(19) United States
(12) Patent Application Publication
(10) Pub. No.: US 2007/0059810 A1
(43) Pub. Date: Mar. 15, 2007

(54) Corynebacterium glutamicum genes encoding stress, resistance and tolerance proteins

(75) Inventors: Markus Pompejus, Freinsheim (DE); Burkhard Kroger, Limburgerhof (DE); Hartwig Schroder, Nussloch (DE); Oskar Zelder, Speyer (DE); Gregor Haberhauer, Limburgerhof (DE); Heung-Shick Lee, Seoul (KR); Hyung-Joon Kim, Seoul (KR)

Correspondence Address: LAHIVE & COCKFIELD, LLP, ONE POST OFFICE SQUARE, BOSTON, MA, 02109-2127, US

(73) Assignee: BASF AG, Ludwigshafen (DE)

(21) Appl. No.: 11/508,783

(22) Filed: Aug. 22, 2006

Related U.S. Application Data
(62) Division of application No. 10/703,799, filed on Nov. 7, 2003.
Application No. 10/703,799 is a continuation of application No. 09/603,208, filed on Jun. 23, 2000, now Pat. No. 6,822,084.
(60) Provisional application No. 60/141,031, filed on Jun. 25, 1999.
(60) Provisional application No. 60/142,692, filed on Jul. 1, 1999.
(60) Provisional application No. 60/151,214, filed on Aug. 27, 1999.

(30) Foreign Application Priority Data
Jul. 9, 1999 (DE) 19932209.0
Jul. 9, 1999 (DE) 19932230.9
Aug. 27, 1999 (DE) 19940764.9
Jul. 1, 1999 (DE) 19930429.7
Jul. 8, 1999 (DE) 19931413.6
Jul. 8, 1999 (DE) 19931457.8
Jul. 8, 1999 (DE) 19931541.8
Jul. 14, 1999 (DE) 19932914.1
Aug. 31, 1999 (DE) 19941382.7

(51) Int. Cl. C12P 21/06; C07H 21/04; C12P 13/04; C12N 9/10; C12N 15/74; C12N 1/21

(52) U.S. Cl. 435/106; 435/69.1; 435/252.3; 435/193; 435/471; 536/23.2

(57) ABSTRACT

Isolated nucleic acid molecules, designated SRT nucleic acid molecules, which encode novel SRT proteins from Corynebacterium glutamicum are described. The invention also provides antisense nucleic acid molecules, recombinant expression vectors containing SRT nucleic acid molecules, and host cells into which the expression vectors have been introduced. The invention still further provides isolated SRT proteins, mutated SRT proteins, fusion proteins, antigenic peptides and methods for the improvement of production of a desired compound from C. glutamicum based on genetic engineering of SRT genes in this organism.

### RELATED APPLICATIONS

[0001] This application is a divisional of U.S. application Ser. No. 10/703,799, filed Nov. 7, 2003, which is a continuation of U.S. patent application Ser. No. 09/603,208, filed Jun. 23, 2000, issued as U.S. Pat. No. 6,822,084 on Nov. 23, 2004, which, in turn, claims priority to prior filed U.S. Provisional Patent Application Ser. No. 60/141,031, filed Jun. 25, 1999, U.S. Provisional Patent Application Ser. No. 60/142,692, filed Jul. 1, 1999, and also to U.S. Provisional Patent Application Ser. No. 60/151,214, filed Aug. 27, 1999. This application also claims priority to German Patent Application No. 19930429.7, filed Jul. 1, 1999, German Patent Application No. 19931413.6, filed Jul. 8, 1999, German Patent Application No. 19931457.8, filed Jul. 8, 1999, German Patent Application No. 19931541.8, filed Jul. 8, 1999, German Patent Application No. 19932209.0, filed Jul. 9, 1999, German Patent Application No. 19932230.9, filed Jul. 9, 1999, German Patent Application No. 19932914.1, filed Jul. 14, 1999, German Patent Application No. 19940764.9, filed Aug. 27, 1999, and German Patent Application No. 19941382.7, filed Aug. 31, 1999. The entire contents of each of the aforementioned applications are hereby expressly incorporated herein by this reference.

### INCORPORATION OF MATERIAL SUBMITTED ON COMPACT DISCS

[0002] This application incorporates herein by reference the material contained on the compact discs submitted herewith as part of this application. Specifically, the file “seqlistcorrected” (992 KB) contained on each of Copy 1, Copy 2 and the CRF copy of the Sequence Listing is hereby incorporated herein by reference. This file was created on Aug. 21, 2006. In addition, the files “Appendix A” (159 KB) and “Appendix B” (55.5 KB) contained on each of the compact disks entitled “Appendices Copy 1” and “Appendices Copy 2” are hereby incorporated herein by reference. Each of these files were created on Jul. 31, 2006.

### BACKGROUND OF THE INVENTION

[0003] Certain products and by-products of naturally-occurring metabolic processes in cells have utility in a wide array of industries, including the food, feed, cosmetics, and pharmaceutical industries. These molecules, collectively termed ‘fine chemicals’, include organic acids, both proteinogenic and non-proteinogenic amino acids, nucleotides and nucleosides, lipids and fatty acids, diols, carbohydrates, aromatic compounds, vitamins and cofactors, and enzymes. Their production is most conveniently performed through large-scale culture of bacteria developed to produce and secrete large quantities of a particular desired molecule. One particularly useful organism for this purpose is Corynebacterium glutamicum, a gram positive, nonpathogenic bacterium. Through strain selection, a number of mutant strains have been developed which produce an array of desirable compounds. However, selection of strains improved for the production of a particular molecule is a time-consuming and difficult process.

### SUMMARY OF THE INVENTION

[0004] The invention provides novel bacterial nucleic acid molecules which have a variety of uses. These uses include the identification of microorganisms which can be used to produce fine chemicals, the modulation of fine chemical production in C. glutamicum or related bacteria, the typing or identification of C. glutamicum or related bacteria, as reference points for mapping the C. glutamicum genome, and as markers for transformation. These novel nucleic acid molecules encode proteins, referred to herein as stress, resistance and tolerance (SRT) proteins.

[0005] C. glutamicum is a gram positive, aerobic bacterium which is commonly used in industry for the large-scale production of a variety of fine chemicals, and also for the degradation of hydrocarbons (such as in petroleum spills) and for the oxidation of terpenoids. The SRT nucleic acid molecules of the invention, therefore, can be used to identify microorganisms which can be used to produce fine chemicals, e.g., by fermentation processes. Modulation of the expression of the SRT nucleic acids of the invention, or modification of the sequence of the SRT nucleic acid molecules of the invention, can be used to modulate the production of one or more fine chemicals from a microorganism (e.g., to improve the yield or production of one or more fine chemicals from a Corynebacterium or Brevibacterium species).

[0006] The SRT nucleic acids of the invention may also be used to identify an organism as being Corynebacterium glutamicum or a close relative thereof, or to identify the presence of C. glutamicum or a relative thereof in a mixed population of microorganisms. The invention provides the nucleic acid sequences of a number of C. glutamicum genes; by probing the extracted genomic DNA of a culture of a unique or mixed population of microorganisms under stringent conditions with a probe spanning a region of a C. glutamicum gene which is unique to this organism, one can ascertain whether this organism is present. Although Corynebacterium glutamicum itself is nonpathogenic, it is related to species pathogenic in humans, such as Corynebacterium diphtheriae (the causative agent of diphtheria); the detection of such organisms is of significant clinical relevance.

[0007] The SRT nucleic acid molecules of the invention may also serve as reference points for mapping of the C. glutamicum genome, or of genomes of related organisms. Similarly, these molecules, or variants or portions thereof, may serve as markers for genetically engineered Corynebacterium or Brevibacterium species.

[0008] The SRT proteins encoded by the novel nucleic acid molecules of the invention are capable of, for example, permitting C. glutamicum to survive in a setting which is either chemically or environmentally hazardous to this microorganism. Given the availability of cloning vectors for use in Corynebacterium glutamicum, such as those disclosed in Sinskey et al., U.S. Pat. No. 4,649,119, and techniques for genetic manipulation of C. glutamicum and the related Brevibacterium species (e.g., lactofermentum) (Yoshihama et al, J. Bacteriol. 162: 591-597 (1985); Katsumata et al., J. Bacteriol. 159: 306-311 (1984); and Santamaria et al., J. Gen. Microbiol. 130: 2237-2246 (1984)), the nucleic acid molecules of the invention may be utilized in the genetic engineering of this organism to make it a better or more efficient producer of one or more fine chemicals, through the ability of these proteins to permit growth and multiplication of C. glutamicum (and also continuous production of one or more fine chemicals) under circumstances which would normally impede growth of the organism, such as those conditions frequently encountered during large-scale fermentative growth. For example, by overexpressing or engineering a heat-shock induced protease molecule such that it is optimized in activity, one may increase the ability of the bacterium to degrade incorrectly folded proteins when the bacterium is challenged with high temperatures. By having fewer misfolded (and possibly misregulated or nonfunctional) proteins to interfere with normal reaction mechanisms in the cell, the cell is increased in its ability to function normally in such a culture, which should in turn provide increased viability. This overall increase in number of cells having greater viability and activity in the culture should also result in an increase in yield, production, and/or efficiency of production of one or more desired fine chemicals, due at least to the relatively greater number of cells producing these chemicals in the culture.

[0009] This invention provides novel SRT nucleic acid molecules which encode SRT proteins which are capable of, for example, permitting C. glutamicum to survive in a setting which is either chemically or environmentally hazardous to this microorganism. Nucleic acid molecules encoding an SRT protein are referred to herein as SRT nucleic acid molecules. In a preferred embodiment, the SRT protein participates in metabolic pathways permitting C. glutamicum to survive in a setting which is either chemically or environmentally hazardous to this microorganism. Examples of such proteins include those encoded by the genes set forth in Table 1.

[0010] Accordingly, one aspect of the invention pertains to isolated nucleic acid molecules (e.g., cDNAs, DNAs, or RNAs) comprising a nucleotide sequence encoding an SRT protein or biologically active portions thereof, as well as nucleic acid fragments suitable as primers or hybridization probes for the detection or amplification of SRT-encoding nucleic acid (e.g., DNA or mRNA). In particularly preferred embodiments, the isolated nucleic acid molecule comprises one of the nucleotide sequences set forth in Appendix A or the coding region or a complement thereof of one of these nucleotide sequences. In other particularly preferred embodiments, the isolated nucleic acid molecule of the invention comprises a nucleotide sequence which hybridizes to or is at least about 50%, preferably at least about 60%, more preferably at least about 70%, 80% or 90%, and even more preferably at least about 95%, 96%, 97%, 98%, 99% or more homologous to a nucleotide sequence set forth in Appendix A, or a portion thereof. In other preferred embodiments, the isolated nucleic acid molecule encodes one of the amino acid sequences set forth in Appendix B. The preferred SRT proteins of the present invention also preferably possess at least one of the SRT activities described herein.

[0011] In another embodiment, the isolated nucleic acid molecule encodes a protein or portion thereof wherein the protein or portion thereof includes an amino acid sequence which is sufficiently homologous to an amino acid sequence of Appendix B, e.g., sufficiently homologous to an amino acid sequence of Appendix B such that the protein or portion thereof maintains an SRT activity. Preferably, the protein or portion thereof encoded by the nucleic acid molecule maintains the ability to increase the survival of C. glutamicum in a setting which is either chemically or environmentally hazardous to this microorganism. In one embodiment, the protein encoded by the nucleic acid molecule is at least about 50%, preferably at least about 60%, and more preferably at least about 70%, 80%, or 90% and most preferably at least about 95%, 96%, 97%, 98%, or 99% or more homologous to an amino acid sequence of Appendix B (e.g., an entire amino acid sequence selected from those sequences set forth in Appendix B). In another preferred embodiment, the protein is a full length C. glutamicum protein which is substantially homologous to an entire amino acid sequence of Appendix B (encoded by an open reading frame shown in Appendix A).

[0012] In another preferred embodiment, the isolated nucleic acid molecule is derived from C. glutamicum and encodes a protein (e.g., an SRT fusion protein) which includes a biologically active domain which is at least about 50% or more homologous to one of the amino acid sequences of Appendix B and has the ability to increase the survival of C. glutamicum in a setting which is either chemically or environmentally hazardous to this microorganism, or possesses one or more of the activities set forth in Table 1, and which also includes heterologous nucleic acid sequences encoding a heterologous polypeptide or regulatory regions.

[0013] In another embodiment, the isolated nucleic acid molecule is at least 15 nucleotides in length and hybridizes under stringent conditions to a nucleic acid molecule comprising a nucleotide sequence of Appendix A. Preferably, the isolated nucleic acid molecule corresponds to a naturally-occurring nucleic acid molecule. More preferably, the isolated nucleic acid encodes a naturally-occurring C. glutamicum SRT protein, or a biologically active portion thereof.

[0014] Another aspect of the invention pertains to vectors, e.g., recombinant expression vectors, containing the nucleic acid molecules of the invention, and host cells into which such vectors have been introduced. In one embodiment, such a host cell is used to produce an SRT protein by culturing the host cell in a suitable medium. The SRT protein can be then isolated from the medium or the host cell.

[0015] Yet another aspect of the invention pertains to a genetically altered microorganism in which an SRT gene has been introduced or altered. In one embodiment, the genome of the microorganism has been altered by the introduction of a nucleic acid molecule of the invention encoding wild-type or mutated SRT sequence as a transgene. In another embodiment, an endogenous SRT gene within the genome of the microorganism has been altered, e.g., functionally disrupted, by homologous recombination with an altered SRT gene. In another embodiment, an endogenous or introduced SRT gene in a microorganism has been altered by one or more point mutations, deletions, or inversions, but still encodes a functional SRT protein. In still another embodiment, one or more of the regulatory regions (e.g., a promoter, repressor, or inducer) of a SRT gene in a microorganism has been altered (e.g., by deletion, truncation, inversion, or point mutation) such that the expression of the SRT gene is modulated. In a preferred embodiment, the microorganism belongs to the genus Corynebacterium or Brevibacterium, with Corynebacterium glutamicum being particularly preferred. In a preferred embodiment, the microorganism is also utilized for the production of a desired compound, such as an amino acid, with lysine being particularly preferred.

[0016] In another aspect, the invention provides a method of identifying the presence or activity of Cornyebacterium diphtheriae in a subject. This method includes detection of one or more of the nucleic acid or amino acid sequences of the invention (e.g., the sequences set forth in Appendix A or Appendix B) in a subject, thereby detecting the presence or activity of Corynebacterium diphtheriae in the subject.

[0017] Still another aspect of the invention pertains to an isolated SRT protein or a portion, e.g., a biologically active portion, thereof. In a preferred embodiment, the isolated SRT protein or portion thereof possesses the ability to increase the survival of C. glutamicum in a setting which is either chemically or environmentally hazardous to this microorganism. In another preferred embodiment, the isolated SRT protein or portion thereof is sufficiently homologous to an amino acid sequence of Appendix B such that the protein or portion thereof maintains the ability to increase the survival of C. glutamicum in a setting which is either chemically or environmentally hazardous to this microorganism.

[0018] The invention also provides an isolated preparation of an SRT protein. In preferred embodiments, the SRT protein comprises an amino acid sequence of Appendix B. In another preferred embodiment, the invention pertains to an isolated full length protein which is substantially homologous to an entire amino acid sequence of Appendix B (encoded by an open reading frame set forth in Appendix A). In yet another embodiment, the protein is at least about 50%, preferably at least about 60%, and more preferably at least about 70%, 80%, or 90%, and most preferably at least about 95%, 96%, 97%, 98%, or 99% or more homologous to an entire amino acid sequence of Appendix B. In other embodiments, the isolated SRT protein comprises an amino acid sequence which is at least about 50% or more homologous to one of the amino acid sequences of Appendix B and is able to improve the survival rate of C. glutamicum in a setting which is either chemically or environmentally hazardous to this microorganism, or has one or more of the activities set forth in Table 1.

[0019] Alternatively, the isolated SRT protein can comprise an amino acid sequence which is encoded by a nucleotide sequence which hybridizes, e.g., hybridizes under stringent conditions, or is at least about 50%, preferably at least about 60%, more preferably at least about 70%, 80%, or 90%, and even more preferably at least about 95%, 96%, 97%, 98,%, or 99% or more homologous, to a nucleotide sequence of Appendix B. It is also preferred that the preferred forms of SRT proteins also have one or more of the SRT bioactivities described herein.

[0020] The SRT polypeptide, or a biologically active portion thereof, can be operatively linked to a non-SRT polypeptide to form a fusion protein. In preferred embodiments, this fusion protein has an activity which differs from that of the SRT protein alone. In other preferred embodiments, this fusion protein results in increased yields, production, and/or efficiency of production of a desired fine chemical from C. glutamicum. In particularly preferred embodiments, integration of this fusion protein into a host cell modulates the production of a desired compound from the cell.

[0021] In another aspect, the invention provides methods for screening molecules which modulate the activity of an SRT protein, either by interacting with the protein itself or a substrate or binding partner of the SRT protein, or by modulating the transcription or translation of an SRT nucleic acid molecule of the invention.

[0022] Another aspect of the invention pertains to a method for producing a fine chemical. This method involves the culturing of a cell containing a vector directing the expression of an SRT nucleic acid molecule of the invention, such that a fine chemical is produced. In a preferred embodiment, this method further includes the step of obtaining a cell containing such a vector, in which a cell is transfected with a vector directing the expression of an SRT nucleic acid. In another preferred embodiment, this method further includes the step of recovering the fine chemical from the culture. In a particularly preferred embodiment, the cell is from the genus Corynebacterium or Brevibacterium, or is selected from those strains set forth in Table 3.

[0023] Another aspect of the invention pertains to methods for modulating production of a molecule from a microorganism. Such methods include contacting the cell with an agent which modulates SRT protein activity or SRT nucleic acid expression such that a cell associated activity is altered relative to this same activity in the absence of the agent. In a preferred embodiment, the cell is modulated in resistance to one or more toxic chemicals or in resistance to one or more environmental stresses, such that the yields or rate of production of a desired fine chemical by this microorganism is improved. The agent which modulates SRT protein activity can be an agent which stimulates SRT protein activity or SRT nucleic acid expression. Examples of agents which stimulate SRT protein activity or SRT nucleic acid expression include small molecules, active SRT proteins, and nucleic acids encoding SRT proteins that have been introduced into the cell. Examples of agents which inhibit SRT activity or expression include small molecules, and antisense SRT nucleic acid molecules.

[0024] Another aspect of the invention pertains to methods for modulating yields of a desired compound from a cell, involving the introduction of a wild-type or mutant SRT gene into a cell, either maintained on a separate plasmid or integrated into the genome of the host cell. If integrated into the genome, such integration can random, or it can take place by homologous recombination such that the native gene is replaced by the introduced copy, causing the production of the desired compound from the cell to be modulated. In a preferred embodiment, said yields are increased. In another preferred embodiment, said chemical is a fine chemical. In a particularly preferred embodiment, said fine chemical is an amino acid. In especially preferred embodiments, said amino acid is L-lysine.

### DETAILED DESCRIPTION OF THE INVENTION

[0025] The present invention provides SRT nucleic acid and protein molecules which are involved in the survival of C. glutamicum upon exposure of this microorganism to chemical or environmental hazards. The molecules of the invention may be utilized in the modulation of production of fine chemicals from microorganisms, since these SRT proteins provide a means for continued growth and multiplication of C. glutamicum in the presence of toxic chemicals or hazardous environmental conditions, such as may be encountered during large-scale fermentative growth. By increasing the growth rate or at least maintaining normal growth in the face of poor, if not toxic, conditions, one may increase the yield, production, and/or efficiency of production of one or more fine chemicals from such a culture, at least due to the relatively greater number of cells producing the fine chemical in the culture. Aspects of the invention are further explicated below.

I. Fine Chemicals

[0026] The term ‘fine chemical’ is art-recognized and includes molecules produced by an organism which have applications in various industries, such as, but not limited to, the pharmaceutical, agriculture, and cosmetics industries. Such compounds include organic acids, such as tartaric acid, itaconic acid, and diaminopimelic acid, both proteinogenic and non-proteinogenic amino acids, purine and pyrimidine bases, nucleosides, and nucleotides (as described e.g. in Kuninaka, A. (1996) Nucleotides and related compounds, p. 561-612, in Biotechnology vol. 6, Rehm et al., eds. VCH: Weinheim, and references contained therein), lipids, both saturated and unsaturated fatty acids (e.g., arachidonic acid), diols (e.g., propane diol, and butane diol), carbohydrates (e.g., hyaluronic acid and trehalose), aromatic compounds (e.g., aromatic amines, vanillin, and indigo), vitamins and cofactors (as described in Ullmann's Encyclopedia of Industrial Chemistry, vol. A27, “Vitamins”, p. 443-613 (1996) VCH: Weinheim and references therein; and Ong, A. S., Niki, E. & Packer, L. (1995) “Nutrition, Lipids, Health, and Disease” Proceedings of the UNESCO/Confederation of Scientific and Technological Associations in Malaysia, and the Society for Free Radical Research—Asia, held Sep. 1-3, 1994 at Penang, Malaysia, AOCS Press, (1995)), enzymes, polyketides (Cane et al. (1998) Science 282: 63-68), and all other chemicals described in Gutcho (1983) Chemicals by Fermentation, Noyes Data Corporation, ISBN: 0818805086 and references therein. The metabolism and uses of certain of these fine chemicals are further explicated below.

A. Amino Acid Metabolism and Uses

[0027] Amino acids comprise the basic structural units of all proteins, and as such are essential for normal cellular functioning in all organisms. The term “amino acid” is art-recognized. The proteinogenic amino acids, of which there are 20 species, serve as structural units for proteins, in which they are linked by peptide bonds, while the nonproteinogenic amino acids (hundreds of which are known) are not normally found in proteins (see Ulmann's Encyclopedia of Industrial Chemistry, vol. A2, p. 57-97 VCH: Weinheim (1985)). Amino acids may be in the D- or L-optical configuration, though L-amino acids are generally the only type found in naturally-occurring proteins. Biosynthetic and degradative pathways of each of the 20 proteinogenic amino acids have been well characterized in both prokaryotic and eukaryotic cells (see, for example, Stryer, L. Biochemistry, 3^{rd} edition, pages 578-590 (1988)). The ‘essential’ amino acids (histidine, isoleucine, leucine, lysine, methionine, phenylalanine, threonine, tryptophan, and valine), so named because they are generally a nutritional requirement due to the complexity of their biosyntheses, are readily converted by simple biosynthetic pathways to the remaining 11 ‘nonessential’ amino acids (alanine, arginine, asparagine, aspartate, cysteine, glutamate, glutamine, glycine, proline, serine, and tyrosine). Higher animals do retain the ability to synthesize some of these amino acids, but the essential amino acids must be supplied from the diet in order for normal protein synthesis to occur.

[0028] Aside from their function in protein biosynthesis, these amino acids are interesting chemicals in their own right, and many have been found to have various applications in the food, feed, chemical, cosmetics, agriculture, and pharmaceutical industries. Lysine is an important amino acid in the nutrition not only of humans, but also of monogastric animals such as poultry and swine. Glutamate is most commonly used as a flavor additive (mono-sodium glutamate, MSG) and is widely used throughout the food industry, as are aspartate, phenylalanine, glycine, and cysteine. Glycine, L-methionine and tryptophan are all utilized in the pharmaceutical industry. Glutamine, valine, leucine, isoleucine, histidine, arginine, proline, serine and alanine are of use in both the pharmaceutical and cosmetics industries. Threonine, tryptophan, and D/L-methionine are common feed additives. (Leuchtenberger, W. (1996) Amino aids-technical production and use, p. 466-502 in Rehm et al. (eds.) Biotechnology vol. 6, chapter 14a, VCH: Weinheim). Additionally, these amino acids have been found to be useful as precursors for the synthesis of synthetic amino acids and proteins, such as N-acetylcysteine, S-carboxymethyl-L-cysteine, (S)-5-hydroxytryptophan, and others described in Ulmann's Encyclopedia of Industrial Chemistry, vol. A2, p. 57-97, VCH: Weinheim, 1985.

[0029] The biosynthesis of these natural amino acids in organisms capable of producing them, such as bacteria, has been well characterized (for review of bacterial amino acid biosynthesis and regulation thereof, see Umbarger, H. E.(1978) Ann. Rev. Biochem. 47: 533-606). Glutamate is synthesized by the reductive amination of α-ketoglutarate, an intermediate in the citric acid cycle. Glutamine, proline, and arginine are each subsequently produced from glutamate. The biosynthesis of serine is a three-step process beginning with 3-phosphoglycerate (an intermediate in glycolysis), and resulting in this amino acid after oxidation, transamination, and hydrolysis steps. Both cysteine and glycine are produced from serine; the former by the condensation of homocysteine with serine, and the latter by the transferal of the side-chain β-carbon atom to tetrahydrofolate, in a reaction catalyzed by serine transhydroxymethylase. Phenylalanine, and tyrosine are synthesized from the glycolytic and pentose phosphate pathway precursors erythrose 4-phosphate and phosphoenolpyruvate in a 9-step biosynthetic pathway that differ only at the final two steps after synthesis of prephenate. Tryptophan is also produced from these two initial molecules, but its synthesis is an 11-step pathway. Tyrosine may also be synthesized from phenylalanine, in a reaction catalyzed by phenylalanine hydroxylase. Alanine, valine, and leucine are all biosynthetic products of pyruvate, the final product of glycolysis. Aspartate is formed from oxaloacetate, an intermediate of the citric acid cycle. Asparagine, methionine, threonine, and lysine are each produced by the conversion of aspartate. Isoleucine is formed from threonine. A complex 9-step pathway results in the production of histidine from 5-phosphoribosyl-1-pyrophosphate, an activated sugar.

[0030] Amino acids in excess of the protein synthesis needs of the cell cannot be stored, and are instead degraded to provide intermediates for the major metabolic pathways of the cell (for review see Stryer, L. Biochemistry 3^{rd} ed. Ch. 21 “Amino Acid Degradation and the Urea Cycle” p. 495-516 (1988)). Although the cell is able to convert unwanted amino acids into useful metabolic intermediates, amino acid production is costly in terms of energy, precursor molecules, and the enzymes necessary to synthesize them. Thus it is not surprising that amino acid biosynthesis is regulated by feedback inhibition, in which the presence of a particular amino acid serves to slow or entirely stop its own production (for overview of feedback mechanisms in amino acid biosynthetic pathways, see Stryer, L. Biochemistry, 3^{rd} ed. Ch. 24: “Biosynthesis of Amino Acids and Heme” p. 575-600 (1988)). Thus, the output of any particular amino acid is limited by the amount of that amino acid present in the cell.

B. Vitamin, Cofactor, and Nutraceutical Metabolism and Uses

[0031] Vitamins, cofactors, and nutraceuticals comprise another group of molecules which the higher animals have lost the ability to synthesize and so must ingest, although they are readily synthesized by other organisms, such as bacteria. These molecules are either bioactive substances themselves, or are precursors of biologically active substances which may serve as electron carriers or intermediates in a variety of metabolic pathways. Aside from their nutritive value, these compounds also have significant industrial value as coloring agents, antioxidants, and catalysts or other processing aids. (For an overview of the structure, activity, and industrial applications of these compounds, see, for example, Ullman's Encyclopedia of Industrial Chemistry, “Vitamins” vol. A27, p. 443-613, VCH: Weinheim, 1996.) The term “vitamin” is art-recognized, and includes nutrients which are required by an organism for normal functioning, but which that organism cannot synthesize by itself. The group of vitamins may encompass cofactors and nutraceutical compounds. The language “cofactor” includes nonproteinaceous compounds required for a normal enzymatic activity to occur. Such compounds may be organic or inorganic; the cofactor molecules of the invention are preferably organic. The term “nutraceutical” includes dietary supplements having health benefits in plants and animals, particularly humans. Examples of such molecules are vitamins, antioxidants, and also certain lipids (e.g., polyunsaturated fatty acids).

[0032] The biosynthesis of these molecules in organisms capable of producing them, such as bacteria, has been largely characterized (Ullman's Encyclopedia of Industrial Chemistry, “Vitamins” vol. A27, p. 443-613, VCH: Weinheim, 1996; Michal, G. (1999) Biochemical Pathways: An Atlas of Biochemistry and Molecular Biology, John Wiley & Sons; Ong, A. S., Niki, E. & Packer, L. (1995) “Nutrition, Lipids, Health, and Disease” Proceedings of the UNESCO/Confederation of Scientific and Technological Associations in Malaysia, and the Society for Free Radical Research—Asia, held Sep. 1-3, 1994 at Penang, Malaysia, AOCS Press: Champaign, IL X, 374 S).

[0033] Thiamin (vitamin B₁) is produced by the chemical coupling of pyrimidine and thiazole moieties. Riboflavin (vitamin B₂) is synthesized from guanosine-5′-triphosphate (GTP) and ribose-5′-phosphate. Riboflavin, in turn, is utilized for the synthesis of flavin mononucleotide (FMN) and flavin adenine dinucleotide (FAD). The family of compounds collectively termed ‘vitamin B₆’ (e.g., pyridoxine, pyridoxamine, pyridoxa-5′-phosphate, and the commercially used pyridoxin hydrochloride) are all derivatives of the common structural unit, 5-hydroxy-6-methylpyridine. Pantothenate (pantothenic acid, (R)-(+)-N-(2,4-dihydroxy-3,3-dimethyl-1-oxobutyl)-β-alanine) can be produced either by chemical synthesis or by fermentation. The final steps in pantothenate biosynthesis consist of the ATP-driven condensation of β-alanine and pantoic acid. The enzymes responsible for the biosynthesis steps for the conversion to pantoic acid, to β-alanine and for the condensation to panthotenic acid are known. The metabolically active form of pantothenate is Coenzyme A, for which the biosynthesis proceeds in 5 enzymatic steps. Pantothenate, pyridoxal-5′-phosphate, cysteine and ATP are the precursors of Coenzyme A. These enzymes not only catalyze the formation of panthothante, but also the production of (R)-pantoic acid, (R)-pantolacton, (R)-panthenol (provitamin B₅), pantetheine (and its derivatives) and coenzyme A.

[0034] Biotin biosynthesis from the precursor molecule pimeloyl-CoA in microorganisms has been studied in detail and several of the genes involved have been identified. Many of the corresponding proteins have been found to also be involved in Fe-cluster synthesis and are members of the nifS class of proteins. Lipoic acid is derived from octanoic acid, and serves as a coenzyme in energy metabolism, where it becomes part of the pyruvate dehydrogenase complex and the α-ketoglutarate dehydrogenase complex. The folates are a group of substances which are all derivatives of folic acid, which is turn is derived from L-glutamic acid, p-amino-benzoic acid and 6-methylpterin. The biosynthesis of folic acid and its derivatives, starting from the metabolism intermediates guanosine-5′-triphosphate (GTP), L-glutamic acid and p-amino-benzoic acid has been studied in detail in certain microorganisms.

[0035] Corrinoids (such as the cobalamines and particularly vitamin B₁₂) and porphyrines belong to a group of chemicals characterized by a tetrapyrole ring system. The biosynthesis of vitamin B₁₂ is sufficiently complex that it has not yet been completely characterized, but many of the enzymes and substrates involved are now known. Nicotinic acid (nicotinate), and nicotinamide are pyridine derivatives which are also termed ‘niacin’. Niacin is the precursor of the important coenzymes NAD (nicotinamide adenine dinucleotide) and NADP (nicotinamide adenine dinucleotide phosphate) and their reduced forms.

[0036] The large-scale production of these compounds has largely relied on cell-free chemical syntheses, though some of these chemicals have also been produced by large-scale culture of microorganisms, such as riboflavin, Vitamin B₆, pantothenate, and biotin. Only Vitamin B₁₂ is produced solely by fermentation, due to the complexity of its synthesis. In vitro methodologies require significant inputs of materials and time, often at great cost.

C. Purine, Pyrimidine, Nucleoside and Nucleotide Metabolism and Uses

[0037] Purine and pyrimidine metabolism genes and their corresponding proteins are important targets for the therapy of tumor diseases and viral infections. The language “purine” or “pyrimidine” includes the nitrogenous bases which are constituents of nucleic acids, co-enzymes, and nucleotides. The term “nucleotide” includes the basic structural units of nucleic acid molecules, which are comprised of a nitrogenous base, a pentose sugar (in the case of RNA, the sugar is ribose; in the case of DNA, the sugar is D-deoxyribose), and phosphoric acid. The language “nucleoside” includes molecules which serve as precursors to nucleotides, but which are lacking the phosphoric acid moiety that nucleotides possess. By inhibiting the biosynthesis of these molecules, or their mobilization to form nucleic acid molecules, it is possible to inhibit RNA and DNA synthesis; by inhibiting this activity in a fashion targeted to cancerous cells, the ability of tumor cells to divide and replicate may be inhibited. Additionally, there are nucleotides which do not form nucleic acid molecules, but rather serve as energy stores (i.e., AMP) or as coenzymes (i.e., FAD and NAD).

[0038] Several publications have described the use of these chemicals for these medical indications, by influencing purine and/or pyrimidine metabolism (e.g. Christopherson, R. I. and Lyons, S. D. (1990) “Potent inhibitors of de novo pyrimidine and purine biosynthesis as chemotherapeutic agents.” Med. Res. Reviews 10: 505-548). Studies of enzymes involved in purine and pyrimidine metabolism have been focused on the development of new drugs which can be used, for example, as immunosuppressants or anti-proliferants (Smith, J. L., (1995) “Enzymes in nucleotide synthesis.” Curr. Opin. Struct. Biol. 5: 752-757; (1995) Biochem Soc. Transact. 23: 877-902). However, purine and pyrimidine bases, nucleosides and nucleotides have other utilities: as intermediates in the biosynthesis of several fine chemicals (e.g., thiamine, S-adenosyl-methionine, folates, or riboflavin), as energy carriers for the cell (e.g., ATP or GTP), and for chemicals themselves, commonly used as flavor enhancers (e.g., IMP or GMP) or for several medicinal applications (see, for example, Kuninaka, A. (1996) Nucleotides and Related Compounds in Biotechnology vol. 6, Rehm et al., eds. VCH: Weinheim, p. 561-612). Also, enzymes involved in purine, pyrimidine, nucleoside, or nucleotide metabolism are increasingly serving as targets against which chemicals for crop protection, including fungicides, herbicides and insecticides, are developed.

[0039] The metabolism of these compounds in bacteria has been characterized (for reviews see, for example, Zalkin, H. and Dixon, J. E. (1992) “de novo purine nucleotide biosynthesis”, in: Progress in Nucleic Acid Research and Molecular Biology, vol. 42, Academic Press:, p. 259-287; and Michal, G. (1999) “Nucleotides and Nucleosides”, Chapter 8 in: Biochemical Pathways: An Atlas of Biochemistry and Molecular Biology, Wiley: New York). Purine metabolism has been the subject of intensive research, and is essential to the normal functioning of the cell. Impaired purine metabolism in higher animals can cause severe disease, such as gout. Purine nucleotides are synthesized from ribose-5-phosphate, in a series of steps through the intermediate compound inosine-5′phosphate (IMP), resulting in the production of guanosine-5′-monophosphate (GMP) or adenosine-5′-monophosphate (AMP), from which the triphosphate forms utilized as nucleotides are readily formed. These compounds are also utilized as energy stores, so their degradation provides energy for many different biochemical processes in the cell. Pyrimidine biosynthesis proceeds by the formation of uridine-5′-monophosphate (UMP) from ribose-5-phosphate. UMP, in turn, is converted to cytidine-5′-triphosphate (CTP). The deoxy-forms of all of these nucleotides are produced in a one step reduction reaction from the diphosphate ribose form of the nucleotide to the diphosphate deoxyribose form of the nucleotide. Upon phosphorylation, these molecules are able to participate in DNA synthesis.

D. Trehalose Metabolism and Uses

[0040] Trehalose consists of two glucose molecules, bound in α, α-1,1 linkage. It is commonly used in the food industry as a sweetener, an additive for dried or frozen foods, and in beverages. However, it also has applications in the pharmaceutical, cosmetics and biotechnology industries (see, for example, Nishimoto et al., (1998) U.S. Pat. No. 5,759,610; Singer, M. A. and Lindquist, S. (1998) Trends Biotech. 16: 460-467; Paiva, C. L. A. and Panek, A. D. (1996) Biotech. Ann. Rev. 2: 293-314; and Shiosaka, M. (1997) J. Japan 172: 97-102). Trehalose is produced by enzymes from many microorganisms and is naturally released into the surrounding medium, from which it can be collected using methods known in the art.

II. Resistance to Damage from Chemicals, Environmental Stress, and Antibiotics

[0041] Production of fine chemicals is typically performed by large-scale culture of bacteria developed to produce and secrete large quantities of these molecules. However, this type of large-scale fermentation results in the subjection of the microorganisms to stresses of various kinds. These stresses include environmental stress and chemical stress.

A. Resistance to Environmental Stress

[0042] Examples of environmental stresses typically encountered in large-scale fermentative culture include mechanical stress, heat stress, stress due to limited oxygen, stress due to oxygen radicals, pH stress, and osmotic stress. The stirring mechanism used in most large-scale fermentors to ensure aeration of the culture produces heat, thus increasing the temperature of the culture. Increases in temperature induce the well-characterized heat shock response, in which a set of proteins are expressed which not only aid in the survival of the bacterium in the face of high temperatures, but also increase survival in response to a number of other environmental stresses (see Neidhardt, F., eds. (1996) E. coli and Salmonella. ASM Press: Washington, D.C., p. 1382-1399; Wosten, M. M. (1998) FEMS Microbiology Reviews 22(3): 127-50; Bahl, H. et al. (1995) FEMS Microbiology Reviews 17(3): 341-348; Zimmerman, J. L., Cohill, P. R. (1991) New Biologist 3(7): 641-650; Samali, A., and Orrenius, S. (1998) Cell. Stress Chaperones 3(4): 228-236, and references contained therein from each of these citations). Regulation of the heat shock response in bacteria is facilitated by specific sigma factors and other cellular regulators of gene expression (Hecker, M., Volker, U (1998). Molecular Microbiology 29(5): 1129-1136). One of the largest problems that the cell encounters when exposed to high temperature is that protein folding is impaired; nascent proteins have sufficient kinetic energy in high temperature circumstances that it is difficult for the growing polypeptide chain to remain in a stable conformation long enough to fold properly. Thus, two of the key types of proteins expressed during the heat shock response consist of chaperones (proteins which assist in the folding or unfolding of other proteins—see, e.g., Fink, A. L. (1999) Physiol. Rev. 79(2): 425-449), and proteases, which can destroy any improperly folded proteins. Examples of chaperones expressed during the heat shock response include GroEL and DNAK; proteases known to be expressed during this cellular reaction to heat shock include Lon, FtsH, and ClpB.

[0043] Other environmental stresses besides heat may also provoke a stress response. Though the fermentor stirring process is meant to introduce oxygen into the culture, oxygen may remain in limited supply, particularly when the culture is advanced in growth and the oxygen needs of the culture are thereby increased; an insufficient supply of oxygen is another stress for the microorganism. Cells in fermentor cultures are also subjected to a number of osmotic stresses, particularly when nutrients are added to the culture, resulting in a high extracellular and low intracellular concentration of these molecules. Further, the large quantities of the desired molecules produced by these organisms in culture may contribute to osmotic stress of the bacteria. Lastly, aerobic metabolism such as that used by C. glutamicum results in carbon dioxide as a waste product; secretion of this molecule may acidify the culture medium due to conversion of this molecule to carboxylic acid. Thus, bacteria in culture are also frequently subjected to acidic pH stress. The converse may also be true—when high levels of basic waste molecules such as ammonium are present in the culture medium, the bacteria in culture may be subjected to basic pH stress as well.

[0044] To combat such environmental stresses, bacteria have elegant gene systems which are expressed upon exposure to one or more stresses, such as the aforementioned heat shock system. Genes expressed in response to osmotic stress, for example, encode proteins capable of transporting or synthesizing compatible solutes such that osmotic intake or export of a particular molecule is slowed to manageable levels. Other examples of stress-induced bacterial proteins are those involved in trehalose biosynthesis, those encoding enzymes involved in ppGpp metabolism, those involved in signal transduction, particularly those encoding two-component systems which are sensitive to osmotic pressure, and those encoding transcription factors which are responsive to a variety of stress factors (e.g., RssB analogues and/or sigma factors). Many other such genes and their protein products are known in the art.

B. Resistance to Chemical Stress

[0045] Aside from environmental stresses, cells may also experience a number of chemical stresses. These may fall into two categories. The first are natural waste products of metabolism and other cellular processes which are secreted by the cell to the surrounding medium. The second are chemicals present in the extracellular medium which do not originate from the cell. Generally, when cells excrete toxic waste products from the concentrated intracellular cytoplasm into the relatively much more dilute extracellular medium, these products dissipate such that extracellular levels of the possibly toxic compound are quite low. However, in large-scale fermentative culture of the bacterium, this may not be the case: so many bacteria are grown in a relatively small environment and at such a high metabolic rate that waste products may accumulate in the medium to nearly toxic levels. Examples of such wastes are carbon dioxide, metal ions, and reactive oxygen species such as hydrogen peroxide. These compounds may interfere with the activity or structure of cell surface molecules, or may re-enter the cell, where they can seriously damage proteins and nucleic acids alike. Certain other chemicals hazardous to the normal functioning of cells may be naturally found in the extracellular medium. For example, metal ions such as mercury, cadmium, nickel or copper are frequently found in water sources, and may form tight complexes with cellular enzymes which prevent the normal functioning of these proteins.

C. Resistance to Antibiotics

[0046] Bacteriocidal proteins or antibiotics, may also be found in the extracellular milieu, either through the intervention of the researcher, or as a natural product from another organism, utilized to gain a competitive advantage. Microorganisms have several art-known mechanisms to protect themselves against antimicrobial chemicals. Degradation, modification, and export of compounds toxic to the cell are common methods by which microorganisms eliminate or detoxify antibiotics. Cytoplasmic ‘efflux-pumps’ are known in several prokaryotes and show similarities to the so-called ‘multidrug resistance’ proteins from higher eukaryotes (Neyfakh, A. A., et al. (1991) Proc. Natl. Acad. Sci. USA 88: 4781-4785). Examples of such proteins include emrAB from E. coli (Lomovskaya, O. and K. Lewis (1992) Proc. Natl. Acad. Sci. USA 89: 8938-8942), ImrB from B. subtilis (Kumano, M. et al. (1997) Microbiology 143: 2775-2782), smr from S. aureus (Grinius, L. G. et al. (1992) Plasmid 27: 119-129) or cmr from C. glutamicum (Kaidoh, K. et al. (1997) Micro. Drug Resist. 3: 345-350). C. glutamicum itself is non-pathogenic, in contrast to several other members of the genus Corynebacterium, such as C. diphtheriae or C. pseudotuberculosis. Several pathogenic Corynebacteria are known to have multiple resistances against a variety of antibiotics, such as C. jeikeium and C. urealyticum (Soriano, F. et al. (1995) Antimicrob. Agents Chemother. 39: 208-214).

[0047] Lincosamides are recognized as effective antibiotics against Corynebacterium species (Soriano, F. et al. (1995) Antimicrob. Agents Chemother. 39: 208-214). An unexpected result of the present invention was the identification of a gene encoding a lincosamide-resistance protein (in particular, a lincomycin-resistance protein). The LMRB protein from C. glutamicum shows 40% homology to the product of the lmrB gene from B. subtilis (see Genbank accession no. AL009126), as calculated using version 1.7 of the program CLUSTALW (Thompson, J. D., Higgins, D. G., Gibson, T. J. (1994) Nucl. Acids Res. 22: 4673-4680) using standard parameters (PAIRWISE ALIGNMENT PARAMETERS: slow/accurate alignments: Gap Open Penalty=10.00, Gap Extension Penalty=0.10, Protein weight matrix=BLOSUM 30, DNA weight matrix=IUB, Fast/Approximate alignments: Gap penalty=3, K-tuple (word) size=1, No. of top diagonals=5, Window size=5, Toggle Slow/Fast pairwise alignments=slow. Multiple alignment parameters: Gap Opening Penalty=10.00, Gap Extension Penalty=0.05, Delay divergent sequences=40%, DNA transitions weight=0.50, Protein weight matrix=BLOSUM series, DNA weight matrix=IUB, Use negative matrix=OFF).

[0048] Environmental stress, chemical stress, and antibiotic or other antimicrobial stress may influence the behavior of the microorganisms during fermentor culture, and may have an impact on the production of the desired compound from these organisms. For example, osmotic stress of a microorganism may cause inappropriate or inappropriately rapid uptake of one or more compounds which can ultimately lead to cellular damage or death due to osmotic shock. Similarly, chemicals present in the culture, either exogenously added (e.g., antimicrobial compounds intended to eliminate unwanted microbes) or generated by the bacteria themselves (e.g., waste compounds such as heavy metals or oxygen radicals, or even antimicrobial compounds) may result in inhibition of fine chemical production or even death of the organism. The genes of the invention encode C. glutamicum proteins which act to prevent cell damage or death, by specifically counteracting the source or effect of the environmental or chemical stress.

III. Elements and Methods of the Invention

[0049] The present invention is based, at least in part, on the discovery of novel molecules, referred to herein as SRT nucleic acid and protein molecules, which increase the ability of C. glutamicum to survive in chemically or environmentally hazardous settings. In one embodiment, the SRT molecules function to confer resistance to one or more environmental or chemical stresses to C. glutamicum. In a preferred embodiment, the activity of the SRT molecules of the present invention has an impact on the production of a desired fine chemical by this organism. In a particularly preferred embodiment, the SRT molecules of the invention are modulated in activity, such that the yield, production, and/or efficiency of production of one or more fine chemicals from C. glutamicum is also modulated.

[0050] The language, “SRT protein” or “SRT polypeptide” includes proteins which participate in the resistance of C. glutamicum to one or more environmental or chemical stresses. Examples of SRT proteins include those encoded by the SRT genes set forth in Table 1 and Appendix A. The terms “SRT gene” or “SRT nucleic acid sequence” include nucleic acid sequences encoding an SRT protein, which consist of a coding region and also corresponding untranslated 5′ and 3′ sequence regions. Examples of SRT genes include those set forth in Table 1. The terms “production” or “productivity” are art-recognized and include the concentration of the fermentation product (for example, the desired fine chemical) formed within a given time and a given fermentation volume (e.g., kg product per hour per liter). The term “efficiency of production” includes the time required for a particular level of production to be achieved (for example, how long it takes for the cell to attain a particular rate of output of a fine chemical). The term “yield” or “product/carbon yield” is art-recognized and includes the efficiency of the conversion of the carbon source into the product (i.e., fine chemical). This is generally written as, for example, kg product per kg carbon source. By increasing the yield or production of the compound, the quantity of recovered molecules, or of useful recovered molecules of that compound in a given amount of culture over a given amount of time is increased. The terms “biosynthesis” or a “biosynthetic pathway” are art-recognized and include the synthesis of a compound, preferably an organic compound, by a cell from intermediate compounds in what may be a multistep and highly regulated process. The terms “degradation” or a “degradation pathway” are art-recognized and include the breakdown of a compound, preferably an organic compound, by a cell to degradation products (generally speaking, smaller or less complex molecules) in what may be a multistep and highly regulated process. The language “metabolism” is art-recognized and includes the totality of the biochemical reactions that take place in an organism. The metabolism of a particular compound, then, (e.g., the metabolism of an amino acid such as glycine) comprises the overall biosynthetic, modification, and degradation pathways in the cell related to this compound. The terms “resistance” and “tolerance” are art-known and include the ability of a cell to not be affected by exposure to a chemical or an environment which would otherwise be detrimental to the normal functioning of these organisms. The terms “stress” or “hazard” include factors which are detrimental to the normal functioning of cells such as C. glutamicum. Examples of stresses include “chemical stress”, in which a cell is exposed to one or more chemicals which are detrimental to the cell, and “environmental stress” where a cell is exposed to an environmental condition outside of those to which it is adapted. Chemical stresses may be either natural metabolic waste products such as, but not limited to reactive oxygen species or carbon dioxide, or chemicals otherwise present in the environment, including, but not limited to heavy metal ions or bacteriocidal proteins such as antibiotics. Environmental stresses may be, but are not limited to temperatures outside of the normal range, suboptimal oxygen availability, osmotic pressures, or extremes of pH, for example.

[0051] In another embodiment, the SRT molecules of the invention are capable of modulating the production of a desired molecule, such as a fine chemical, in a microorganism such as C. glutamicum. Using recombinant genetic techniques, one or more of the SRT proteins of the invention may be manipulated such that its function is modulated. The alteration of activity of stress response, resistance or tolerance genes such that the cell is increased in tolerance to one or more stresses may improve the ability of that cell to grow and multiply in the relatively stressful conditions of large-scale fermentor culture. For example, by overexpressing or engineering a heat-shock induced chaperone molecule such that it is optimized in activity, one may increase the ability of the bacterium to correctly fold proteins in the face of nonoptimal temperature conditions. By having fewer misfolded (and possibly misregulated or nonfunctional) proteins, the cell is increased in its ability to function normally in such a culture, which should in turn provide increased viability. This overall increase in number of cells having greater viability and activity in the culture should also result in an increase in the yield, production, and/or efficiency of production of one or more desired fine chemicals, due at least to the relatively greater number of cells producing these chemicals in the culture.

[0052] The isolated nucleic acid sequences of the invention are contained within the genome of a Corynebacterium glutamicum strain available through the American Type Culture Collection, given designation ATCC 13032. The nucleotide sequence of the isolated C. glutamicum SRT DNAs and the predicted amino acid sequences of the C. glutamicum SRT proteins are shown in Appendices A and B, respectively. Computational analyses were performed which classified and/or identified these nucleotide sequences as sequences which encode chemical and environmental stress, resistance, and tolerance proteins.

[0053] The present invention also pertains to proteins which have an amino acid sequence which is substantially homologous to an amino acid sequence of Appendix B. As used herein, a protein which has an amino acid sequence which is substantially homologous to a selected amino acid sequence is least about 50% homologous to the selected amino acid sequence, e.g., the entire selected amino acid sequence. A protein which has an amino acid sequence which is substantially homologous to a selected amino acid sequence can also be least about 50-60%, preferably at least about 60-70%, and more preferably at least about 70-80%, 80-90%, or 90-95%, and most preferably at least about 96%, 97%, 98%, 99% or more homologous to the selected amino acid sequence. Ranges and identity values intermediate to the above-recited values, (e.g., 75%-80% identical, 85-87% identical, 91-92% identical) are also intended to be encompassed by the present invention. For example, ranges of identity values using a combination of any of the above values recited as upper and/or lower limits are intended to be included.

[0054] The SRT proteins or biologically active portions or fragments thereof of the invention can confer resistance or tolerance to one or more chemical or environmental stresses, or may have one or more of the activities set forth in Table 1.

[0055] Various aspects of the invention are described in further detail in the following subsections:

A. Isolated Nucleic Acid Molecules

[0056] One aspect of the invention pertains to isolated nucleic acid molecules that encode SRT polypeptides or biologically active portions thereof, as well as nucleic acid fragments sufficient for use as hybridization probes or primers for the identification or amplification of SRT-encoding nucleic acid (e.g., SRT DNA). As used herein, the term “nucleic acid molecule” is intended to include DNA molecules (e.g., cDNA or genomic DNA) and RNA molecules (e.g., mRNA) and analogs of the DNA or RNA generated using nucleotide analogs. This term also encompasses untranslated sequence located at both the 3′ and 5′ ends of the coding region of the gene: at least about 100 nucleotides of sequence upstream from the 5′ end of the coding region and at least about 20 nucleotides of sequence downstream from the 3′end of the coding region of the gene. The nucleic acid molecule can be single-stranded or double-stranded, but preferably is double-stranded DNA. An “isolated” nucleic acid molecule is one which is separated from other nucleic acid molecules which are present in the natural source of the nucleic acid. Preferably, an “isolated” nucleic acid is free of sequences which naturally flank the nucleic acid (i.e., sequences located at the 5′ and 3′ ends of the nucleic acid) in the genomic DNA of the organism from which the nucleic acid is derived. For example, in various embodiments, the isolated SRT nucleic acid molecule can contain less than about 5 kb, 4 kb, 3 kb, 2 kb, 1 kb, 0.5 kb or 0.1 kb of nucleotide sequences which naturally flank the nucleic acid molecule in genomic DNA of the cell from which the nucleic acid is derived (e. g, a C. glutamicum cell). Moreover, an “isolated” nucleic acid molecule, such as a DNA molecule, can be substantially free of other cellular material, or culture medium when produced by recombinant techniques, or chemical precursors or other chemicals when chemically synthesized.

[0057] A nucleic acid molecule of the present invention, e.g., a nucleic acid molecule having a nucleotide sequence of Appendix A, or a portion thereof, can be isolated using standard molecular biology techniques and the sequence information provided herein. For example, a C. glutamicum SRT DNA can be isolated from a C. glutamicum library using all or portion of one of the sequences of Appendix A as a hybridization probe and standard hybridization techniques (e.g., as described in Sambrook, J., Fritsh, E. F., and Maniatis, T. Molecular Cloning: A Laboratory Manual. 2nd, ed., Cold Spring Harbor Laboratory, Cold Spring Harbor Laboratory Press, Cold Spring Harbor, N.Y., 1989). Moreover, a nucleic acid molecule encompassing all or a portion of one of the sequences of Appendix A can be isolated by the polymerase chain reaction using oligonucleotide primers designed based upon this sequence (e.g., a nucleic acid molecule encompassing all or a portion of one of the sequences of Appendix A can be isolated by the polymerase chain reaction using oligonucleotide primers designed based upon this same sequence of Appendix A). For example, mRNA can be isolated from normal endothelial cells (e.g., by the guanidinium-thiocyanate extraction procedure of Chirgwin et al. (1979) Biochemistry 18: 5294-5299) and DNA can be prepared using reverse transcriptase (e.g., Moloney MLV reverse transcriptase, available from Gibco/BRL, Bethesda, Md.; or AMV reverse transcriptase, available from Seikagaku America, Inc., St. Petersburg, Fla.). Synthetic oligonucleotide primers for polymerase chain reaction amplification can be designed based upon one of the nucleotide sequences shown in Appendix A. A nucleic acid of the invention can be amplified using cDNA or, alternatively, genomic DNA, as a template and appropriate oligonucleotide primers according to standard PCR amplification techniques. The nucleic acid so amplified can be cloned into an appropriate vector and characterized by DNA sequence analysis. Furthermore, oligonucleotides corresponding to an SRT nucleotide sequence can be prepared by standard synthetic techniques, e.g., using an automated DNA synthesizer.

[0058] In a preferred embodiment, an isolated nucleic acid molecule of the invention comprises one of the nucleotide sequences shown in Appendix A. The sequences of Appendix A correspond to the Corynebacterium glutamicum SRT DNAs of the invention. This DNA comprises sequences encoding SRT proteins (i.e., the “coding region”, indicated in each sequence in Appendix A), as well as 5′ untranslated sequences and 3′ untranslated sequences, also indicated in Appendix A. Alternatively, the nucleic acid molecule can comprise only the coding region of any of the sequences in Appendix A.

[0059] For the purposes of this application, it will be understood that each of the sequences set forth in Appendix A has an identifying RXA, RXN, or RXSnumber having the designation “RXA”, or “RXS” followed by 5 digits (i.e., RXA01524, RXN00493, or RXS01027). Each of these sequences comprises up to three parts: a 5′ upstream region, a coding region, and a downstream region. Each of these three regions is identified by the same RXA, RXN, or RXS designation to eliminate confusion. The recitation “one of the sequences in Appendix A”, then, refers to any of the sequences in Appendix A, which may be distinguished by their differing RXA, RXN, or RXS designations. The coding region of each of these sequences is translated into a corresponding amino acid sequence, which is set forth in Appendix B. The sequences of Appendix B are identified by the same RXA, RXN, or RXS designations as Appendix A, such that they can be readily correlated. For example, the amino acid sequence in Appendix B designated RXA01524 is a translation of the coding region of the nucleotide sequence of nucleic acid molecule RXA01524 in Appendix A, the amino acid sequence in Appendix B designated RXN00034 is a translation of the coding region of the nucleotide sequence of nucleic acid molecule RXN00034 in Appendix A, and the amino acid sequence in Appendix B designated RXS00568 is a translation of the coding region of the nucleotide sequence of nucleic acid molecule RXS00568 in Appendix A. Each of the RXA, RXN, and RXS nucleotide and amino acid sequences of the invention has also been assigned a SEQ ID NO, as indicated in Table 1.

[0060] Several of the genes of the invention are “F-designated genes”. An F-designated gene includes those genes set forth in Table 1 which have an ‘F’ in front of the RXA, RXN, or RXS designation. For example, SEQ ID NO:7, designated, as indicated on Table 1, as “F RXA00498”, is an F-designated gene, as are SEQ ID NOs: 25, 33, and 37 (designated on Table 1 as “F RXA01345”, “F RXA02543”, and “F RXA02282”, respectively).

[0061] In one embodiment, the nucleic acid molecules of the present invention are not intended to include those compiled in Table 2. In the case of the dapD gene, a sequence for this gene was published in Wehrmann, A., et al. (1998) J. Bacteriol. 180(12): 3159-3165. However, the sequence obtained by the inventors of the present application is significantly longer than the published version. It is believed that the published version relied on an incorrect start codon, and thus represents only a fragment of the actual coding region.

[0062] In another preferred embodiment, an isolated nucleic acid molecule of the invention comprises a nucleic acid molecule which is a complement of one of the nucleotide sequences shown in Appendix A, or a portion thereof. A nucleic acid molecule which is complementary to one of the nucleotide sequences shown in Appendix A is one which is sufficiently complementary to one of the nucleotide sequences shown in Appendix A such that it can hybridize to one of the nucleotide sequences shown in Appendix A, thereby forming a stable duplex.

[0063] In still another preferred embodiment, an isolated nucleic acid molecule of the invention comprises a nucleotide sequence which is at least about 50%, 51%, 52%, 53%, 54%, 55%, 56%, 57%, 58%, 59%, or 60%, preferably at least about 61%, 62%, 63%, 64%, 65%, 66%, 67%, 68%, 69%, or 70%%, more preferably at least about 71%, 72%, 73%, 74%, 75%, 76%, 77%, 78%, 79%, or 80%, 81%, 82%, 83%, 84%, 85%, 86%, 87%, 88%, 89%, or 90%, or 91%, 92%, 93%, 94%, and even more preferably at least about 95%, 96%, 97%, 98%, 99% or more homologous to a nucleotide sequence shown in Appendix A, or a portion thereof. Ranges and identity values intermediate to the above-recited ranges, (e.g., 70-90% identical or 80-95% identical) are also intended to be encompassed by the present invention. For example, ranges of identity values using a combination of any of the above values recited as upper and/or lower limits are intended to be included. In an additional preferred embodiment, an isolated nucleic acid molecule of the invention comprises a nucleotide sequence which hybridizes, e.g., hybridizes under stringent conditions, to one of the nucleotide sequences shown in Appendix A, or a portion thereof.

[0064] Moreover, the nucleic acid molecule of the invention can comprise only a portion of the coding region of one of the sequences in Appendix A, for example a fragment which can be used as a probe or primer or a fragment encoding a biologically active portion of an SRT protein. The nucleotide sequences determined from the cloning of the SRT genes from C. glutamicum allows for the generation of probes and primers designed for use in identifying and/or cloning SRT homologues in other cell types and organisms, as well as SRT homologues from other Corynebacteria or related species. The probe/primer typically comprises substantially purified oligonucleotide. The oligonucleotide typically comprises a region of nucleotide sequence that hybridizes under stringent conditions to at least about 12, preferably about 25, more preferably about 40, 50 or 75 consecutive nucleotides of a sense strand of one of the sequences set forth in Appendix A, an anti-sense sequence of one of the sequences set forth in Appendix A, or naturally occurring mutants thereof. Primers based on a nucleotide sequence of Appendix A can be used in PCR reactions to clone SRT homologues. Probes based on the SRT nucleotide sequences can be used to detect transcripts or genomic sequences encoding the same or homologous proteins. In preferred embodiments, the probe further comprises a label group attached thereto, e.g. the label group can be a radioisotope, a fluorescent compound, an enzyme, or an enzyme co-factor. Such probes can be used as a part of a diagnostic test kit for identifying cells which misexpress an SRT protein, such as by measuring a level of an SRT-encoding nucleic acid in a sample of cells, e.g., detecting SRT mRNA levels or determining whether a genomic SRT gene has been mutated or deleted.

[0065] In one embodiment, the nucleic acid molecule of the invention encodes a protein or portion thereof which includes an amino acid sequence which is sufficiently homologous to an amino acid sequence of Appendix B such that the protein or portion thereof maintains the ability to confer resistance or tolerance of C. glutamicum to one or more chemical or environmental stresses. As used herein, the language “sufficiently homologous” refers to proteins or portions thereof which have amino acid sequences which include a minimum number of identical or equivalent (e.g., an amino acid residue which has a similar side chain as an amino acid residue in one of the sequences of Appendix B) amino acid residues to an amino acid sequence of Appendix B such that the protein or portion thereof is capable of participating in the resistance of C. glutamicum to one or more chemical or environmental stresses. Protein members of such metabolic pathways, as described herein, function to increase the resistance or tolerance of C. glutamicum to one or more environmental or chemical hazards or stresses. Examples of such activities are also described herein. Thus, “the function of an SRT protein” contributes to the overall resistance of C. glutamicum to elements of its surroundings which may impede its normal growth or functioning, and/or contributes, either directly or indirectly, to the yield, production, and/or efficiency of production of one or more fine chemicals. Examples of SRT protein activities are set forth in Table 1.

[0066] In another embodiment, the protein is at least about 50-60%, preferably at least about 60-70%, and more preferably at least about 70-80%, 80-90%, 90-95%, and most preferably at least about 96%, 97%, 98%, 99% or more homologous to an entire amino acid sequence of Appendix B. Ranges and identity values intermediate to the above-recited values, (e.g., 75%-80% identical, 85-87% identical, or 91-92% identical) are also intended to be encompassed by the present invention. For example, ranges of identity values using a combination of any of the above values recited as upper and/or lower limits are intended to be included.

[0067] Portions of proteins encoded by the SRT nucleic acid molecules of the invention are preferably biologically active portions of one of the SRT proteins. As used herein, the term “biologically active portion of an SRT protein” is intended to include a portion, e.g., a domain/motif, of an SRT protein that is capable of imparting resistance or tolerance to one or more environmental or chemical stresses or hazards, or has an activity as set forth in Table 1. To determine whether an SRT protein or a biologically active portion thereof can increase the resistance or tolerance of C. glutamicum to one or more chemical or environmental stresses or hazards, an assay of enzymatic activity may be performed. Such assay methods are well known to those of ordinary skill in the art, as detailed in Example 8 of the Exemplification.

[0068] Additional nucleic acid fragments encoding biologically active portions of an SRT protein can be prepared by isolating a portion of one of the sequences in Appendix B, expressing the encoded portion of the SRT protein or peptide (e.g., by recombinant expression in vitro) and assessing the activity of the encoded portion of the SRT protein or peptide.

[0069] The invention further encompasses nucleic acid molecules that differ from one of the nucleotide sequences shown in Appendix A (and portions thereof) due to degeneracy of the genetic code and thus encode the same SRT protein as that encoded by the nucleotide sequences shown in Appendix A. In another embodiment, an isolated nucleic acid molecule of the invention has a nucleotide sequence encoding a protein having an amino acid sequence shown in Appendix B. In a still further embodiment, the nucleic acid molecule of the invention encodes a full length C. glutamicum protein which is substantially homologous to an amino acid sequence of Appendix B (encoded by an open reading frame shown in Appendix A).

[0070] It will be understood by one of ordinary skill in the art that in one embodiment the sequences of the invention are not meant to include the sequences of the prior art, such as those Genbank sequences set forth in Tables 2 or 4 which were available prior to the present invention. In one embodiment, the invention includes nucleotide and amino acid sequences having a percent identity to a nucleotide or amino acid sequence of the invention which is greater than that of a sequence of the prior art (e.g., a Genbank sequence (or the protein encoded by such a sequence) set forth in Tables 2 or 4). For example, the invention includes a nucleotide sequence which is greater than and/or at least 39% identical to the nucleotide sequence designated RXA00084 (SEQ ID NO:189), a nucleotide sequence which is greater than and/or at least 56% identical to the nucleotide sequence designated RXA00605 (SEQ ID NO:11), and a nucleotide sequence which is greater than and/or at least 50% identical to the nucleotide sequence designated RXA00886 (SEQ ID NO:39). One of ordinary skill in the art would be able to calculate the lower threshold of percent identity for any given sequence of the invention by examining the GAP-calculated percent identity scores set forth in Table 4 for each of the three top hits for the given sequence, and by subtracting the highest GAP-calculated percent identity from 100 percent. One of ordinary skill in the art will also appreciate that nucleic acid and amino acid sequences having percent identities greater than the lower threshold so calculated (e.g., at least 50%, 51%, 52%, 53%, 54%, 55%, 56%, 57%, 58%, 59%, or 60%, preferably at least about 61%, 62%, 63%, 64%, 65%, 66%, 67%, 68%, 69%, or 70%, more preferably at least about 71%, 72%, 73%, 74%, 75%, 76%, 77%, 78%, 79%, or 80%, 81%, 82%, 83%, 84%, 85%, 86%, 87%, 88%, 89%, or 90%, or 91%, 92%, 93%, 94%, and even more preferably at least about 95%, 96%, 97%, 98%, 99% or more identical) are also encompassed by the invention.

[0071] In addition to the C. glutamicum SRT nucleotide sequences shown in Appendix A, it will be appreciated by one of ordinary skill in the art that DNA sequence polymorphisms that lead to changes in the amino acid sequences of SRT proteins may exist within a population (e.g., the C. glutamicum population). Such genetic polymorphism in the SRT gene may exist among individuals within a population due to natural variation. As used herein, the terms “gene” and “recombinant gene” refer to nucleic acid molecules comprising an open reading frame encoding an SRT protein, preferably a C. glutamicum SRT protein. Such natural variations can typically result in 1-5% variance in the nucleotide sequence of the SRT gene. Any and all such nucleotide variations and resulting amino acid polymorphisms in SRT that are the result of natural variation and that do not alter the functional activity of SRT proteins are intended to be within the scope of the invention.

[0072] Nucleic acid molecules corresponding to natural variants and non-C. glutamicum homologues of the C. glutamicum SRT DNA of the invention can be isolated based on their homology to the C. glutamicum SRT nucleic acid disclosed herein using the C. glutamicum DNA, or a portion thereof, as a hybridization probe according to standard hybridization techniques under stringent hybridization conditions. Accordingly, in another embodiment, an isolated nucleic acid molecule of the invention is at least 15 nucleotides in length and hybridizes under stringent conditions to the nucleic acid molecule comprising a nucleotide sequence of Appendix A. In other embodiments, the nucleic acid is at least 30, 50, 100, 250 or more nucleotides in length. As used herein, the term “hybridizes under stringent conditions” is intended to describe conditions for hybridization and washing under which nucleotide sequences at least 60% homologous to each other typically remain hybridized to each other. Preferably, the conditions are such that sequences at least about 65%, more preferably at least about 70%, and even more preferably at least about 75% or more homologous to each other typically remain hybridized to each other. Such stringent conditions are known to those of ordinary skill in the art in the art and can be found in Ausubel et al., Current Protocols in Molecular Biology, John Wiley & Sons, N.Y. (1989), 6.3.1-6.3.6. A preferred, non-limiting example of stringent hybridization conditions are hybridization in 6× sodium chloride/sodium citrate (SSC) at about 45° C., followed by one or more washes in 0.2×SSC, 0.1% SDS at 50-65° C. Preferably, an isolated nucleic acid molecule of the invention that hybridizes under stringent conditions to a sequence of Appendix A corresponds to a naturally-occurring nucleic acid molecule. As used herein, a “naturally-occurring” nucleic acid molecule refers to an RNA or DNA molecule having a nucleotide sequence that occurs in nature (e.g., encodes a natural protein). In one embodiment, the nucleic acid encodes a natural C. glutamicum SRT protein.

[0073] In addition to naturally-occurring variants of the SRT sequence that may exist in the population, one of ordinary skill in the art will further appreciate that changes can be introduced by mutation into a nucleotide sequence of Appendix A, thereby leading to changes in the amino acid sequence of the encoded SRT protein, without altering the functional ability of the SRT protein. For example, nucleotide substitutions leading to amino acid substitutions at “non-essential” amino acid residues can be made in a sequence of Appendix A. A “non-essential” amino acid residue is a residue that can be altered from the wild-type sequence of one of the SRT proteins (Appendix B) without altering the activity of said SRT protein, whereas an “essential” amino acid residue is required for SRT protein activity. Other amino acid residues, however, (e.g., those that are not conserved or only semi-conserved in the domain having SRT activity) may not be essential for activity and thus are likely to be amenable to alteration without altering SRT activity.

[0074] Accordingly, another aspect of the invention pertains to nucleic acid molecules encoding SRT proteins that contain changes in amino acid residues that are not essential for SRT activity. Such SRT proteins differ in amino acid sequence from a sequence contained in Appendix B yet retain at least one of the SRT activities described herein. In one embodiment, the isolated nucleic acid molecule comprises a nucleotide sequence encoding a protein, wherein the protein comprises an amino acid sequence at least about 50% homologous to an amino acid sequence of Appendix B and is capable of increasing the resistance or tolerance of C. glutamicum to one or more environmental or chemical stresses, or has one or more of the activities set forth in Table 1. Preferably, the protein encoded by the nucleic acid molecule is at least about 50-60% homologous to one of the sequences in Appendix B, more preferably at least about 60-70% homologous to one of the sequences in Appendix B, even more preferably at least about 70-80%, 80-90%, 90-95% homologous to one of the sequences in Appendix B, and most preferably at least about 96%, 97%, 98%, or 99% homologous to one of the sequences in Appendix B.

[0075] To determine the percent homology of two amino acid sequences (e.g., one of the sequences of Appendix B and a mutant form thereof) or of two nucleic acids, the sequences are aligned for optimal comparison purposes (e.g., gaps can be introduced in the sequence of one protein or nucleic acid for optimal alignment with the other protein or nucleic acid). The amino acid residues or nucleotides at corresponding amino acid positions or nucleotide positions are then compared. When a position in one sequence (e.g., one of the sequences of Appendix B) is occupied by the same amino acid residue or nucleotide as the corresponding position in the other sequence (e.g., a mutant form of the sequence selected from Appendix B), then the molecules are homologous at that position (i.e., as used herein amino acid or nucleic acid “homology” is equivalent to amino acid or nucleic acid “identity”). The percent homology between the two sequences is a function of the number of identical positions shared by the sequences (i.e., % homology=# of identical positions/total # of positions×100).

[0076] An isolated nucleic acid molecule encoding an SRT protein homologous to a protein sequence of Appendix B can be created by introducing one or more nucleotide substitutions, additions or deletions into a nucleotide sequence of Appendix A such that one or more amino acid substitutions, additions or deletions are introduced into the encoded protein. Mutations can be introduced into one of the sequences of Appendix A by standard techniques, such as site-directed mutagenesis and PCR-mediated mutagenesis. Preferably, conservative amino acid substitutions are made at one or more predicted non-essential amino acid residues. A “conservative amino acid substitution” is one in which the amino acid residue is replaced with an amino acid residue having a similar side chain. Families of amino acid residues having similar side chains have been defined in the art. These families include amino acids with basic side chains (e.g., lysine, arginine, histidine), acidic side chains (e.g., aspartic acid, glutamic acid), uncharged polar side chains (e.g., glycine, asparagine, glutamine, serine, threonine, tyrosine, cysteine), nonpolar side chains (e.g., alanine, valine, leucine, isoleucine, proline, phenylalanine, methionine, tryptophan), beta-branched side chains (e.g., threonine, valine, isoleucine) and aromatic side chains (e.g., tyrosine, phenylalanine, tryptophan, histidine). Thus, a predicted nonessential amino acid residue in an SRT protein is preferably replaced with another amino acid residue from the same side chain family. Alternatively, in another embodiment, mutations can be introduced randomly along all or part of an SRT coding sequence, such as by saturation mutagenesis, and the resultant mutants can be screened for an SRT activity described herein to identify mutants that retain SRT activity. Following mutagenesis of one of the sequences of Appendix A, the encoded protein can be expressed recombinantly and the activity of the protein can be determined using, for example, assays described herein (see Example 8 of the Exemplification).

[0077] In addition to the nucleic acid molecules encoding SRT proteins described above, another aspect of the invention pertains to isolated nucleic acid molecules which are antisense thereto. An “antisense” nucleic acid comprises a nucleotide sequence which is complementary to a “sense” nucleic acid encoding a protein, e.g., complementary to the coding strand of a double-stranded DNA molecule or complementary to an mRNA sequence. Accordingly, an antisense nucleic acid can hydrogen bond to a sense nucleic acid. The antisense nucleic acid can be complementary to an entire SRT coding strand, or to only a portion thereof. In one embodiment, an antisense nucleic acid molecule is antisense to a “coding region” of the coding strand of a nucleotide sequence encoding an SRT protein. The term “coding region” refers to the region of the nucleotide sequence comprising codons which are translated into amino acid residues (e.g., the entire coding region of SEQ ID NO.: 120 (RXA00600) comprises nucleotides 1 to 1098). In another embodiment, the antisense nucleic acid molecule is antisense to a “noncoding region” of the coding strand of a nucleotide sequence encoding SRT. The term “noncoding region” refers to 5′ and 3′ sequences which flank the coding region that are not translated into amino acids (i.e., also referred to as 5′ and 3′ untranslated regions).

[0078] Given the coding strand sequences encoding SRT disclosed herein (e.g., the sequences set forth in Appendix A), antisense nucleic acids of the invention can be designed according to the rules of Watson and Crick base pairing. The antisense nucleic acid molecule can be complementary to the entire coding region of SRT mRNA, but more preferably is an oligonucleotide which is antisense to only a portion of the coding or noncoding region of SRT mRNA. For example, the antisense oligonucleotide can be complementary to the region surrounding the translation start site of SRT mRNA. An antisense oligonucleotide can be, for example, about 5, 10, 15, 20, 25, 30, 35, 40, 45 or 50 nucleotides in length. An antisense nucleic acid of the invention can be constructed using chemical synthesis and enzymatic ligation reactions using procedures known in the art. For example, an antisense nucleic acid (e.g., an antisense oligonucleotide) can be chemically synthesized using naturally occurring nucleotides or variously modified nucleotides designed to increase the biological stability of the molecules or to increase the physical stability of the duplex formed between the antisense and sense nucleic acids, e.g., phosphorothioate derivatives and acridine substituted nucleotides can be used. Examples of modified nucleotides which can be used to generate the antisense nucleic acid include 5-fluorouracil, 5-bromouracil, 5-chlorouracil, 5-iodouracil, hypoxanthine, xanthine, 4-acetylcytosine, 5-(carboxyhydroxylmethyl)uracil, 5-carboxymethylaminomethyl-2-thiouridine, 5-carboxymethylaminomethyluracil, dihydrouracil, beta-D-galactosylqueosine, inosine, N6-isopentenyladenine, 1-methylguanine, 1-methylinosine, 2,2-dimethylguanine, 2-methyladenine, 2-methylguanine, 3-methylcytosine, 5-methylcytosine, N6-adenine, 7-methylguanine, 5-methylaminomethyluracil, 5-methoxyaminomethyl-2-thiouracil, beta-D-mannosylqueosine, 5′-methoxycarboxymethyluracil, 5-methoxyuracil, 2-methylthio-N-6-isopentenyladenine, uracil-5-oxyacetic acid (v), wybutoxosine, pseudouracil, queosine, 2-thiocytosine, 5-methyl-2-thiouracil, 2-thiouracil, 4-thiouracil, 5-methyluracil, uracil-5-oxyacetic acid methylester, uracil-5-oxyacetic acid (v), 5-methyl-2-thiouracil, 3-(3-amino-3-N-2-carboxypropyl)uracil, (acp3)w, and 2,6-diaminopurine. Alternatively, the antisense nucleic acid can be produced biologically using an expression vector into which a nucleic acid has been subcloned in an antisense orientation (i.e., RNA transcribed from the inserted nucleic acid will be of an antisense orientation to a target nucleic acid of interest, described further in the following subsection).

[0079] The antisense nucleic acid molecules of the invention are typically administered to a cell or generated in situ such that they hybridize with or bind to cellular mRNA and/or genomic DNA encoding an SRT protein to thereby inhibit expression of the protein, e.g., by inhibiting transcription and/or translation. The hybridization can be by conventional nucleotide complementarity to form a stable duplex, or, for example, in the case of an antisense nucleic acid molecule which binds to DNA duplexes, through specific interactions in the major groove of the double helix. The antisense molecule can be modified such that it specifically binds to a receptor or an antigen expressed on a selected cell surface, e.g., by linking the antisense nucleic acid molecule to a peptide or an antibody which binds to a cell surface receptor or antigen. The antisense nucleic acid molecule can also be delivered to cells using the vectors described herein. To achieve sufficient intracellular concentrations of the antisense molecules, vector constructs in which the antisense nucleic acid molecule is placed under the control of a strong prokaryotic, viral, or eukaryotic promoter are preferred.

[0080] In yet another embodiment, the antisense nucleic acid molecule of the invention is an α-anomeric nucleic acid molecule. An α-anomeric nucleic acid molecule forms specific double-stranded hybrids with complementary RNA in which, contrary to the usual β-units, the strands run parallel to each other (Gaultier et al. (1987) Nucleic Acids. Res. 15:6625-6641). The antisense nucleic acid molecule can also comprise a 2′-o-methylribonucleotide (Inoue et al. (1987) Nucleic Acids Res. 15:6131-6148) or a chimeric RNA-DNA analogue (Inoue et al. (1987) FEBS Lett. 215:327-330).

[0081] In still another embodiment, an antisense nucleic acid of the invention is a ribozyme. Ribozymes are catalytic RNA molecules with ribonuclease activity which are capable of cleaving a single-stranded nucleic acid, such as an mRNA, to which they have a complementary region. Thus, ribozymes (e.g., hammerhead ribozymes (described in Haselhoff and Gerlach (1988) Nature 334:585-591)) can be used to catalytically cleave SRT mRNA transcripts to thereby inhibit translation of SRT mRNA. A ribozyme having specificity for an SRT-encoding nucleic acid can be designed based upon the nucleotide sequence of an SRT cDNA disclosed herein (i.e., SEQ ID NO:119 (RXA00600 in Appendix A)). For example, a derivative of a Tetrahymena L-19 IVS RNA can be constructed in which the nucleotide sequence of the active site is complementary to the nucleotide sequence to be cleaved in an SRT-encoding mRNA. See, e.g., Cech et al. U.S. Pat. No. 4,987,071 and Cech et al. U.S. Pat. No. 5,116,742. Alternatively, SRT mRNA can be used to select a catalytic RNA having a specific ribonuclease activity from a pool of RNA molecules. See, e.g., Bartel, D. and Szostak, J. W. (1993) Science 261:1411-1418.

[0082] Alternatively, SRT gene expression can be inhibited by targeting nucleotide sequences complementary to the regulatory region of an SRT nucleotide sequence (e.g., an SRT promoter and/or enhancers) to form triple helical structures that prevent transcription of an SRT gene in target cells. See generally, Helene, C. (1991) Anticancer Drug Des. 6(6):569-84; Helene, C. et al. (1992) Ann. N.Y. Acad. Sci. 660:27-36; and Maher, L. J. (1992) Bioassays 14(12):807-15.

B. Recombinant Expression Vectors and Host Cells

[0083] Another aspect of the invention pertains to vectors, preferably expression vectors, containing a nucleic acid encoding an SRT protein (or a portion thereof). As used herein, the term “vector” refers to a nucleic acid molecule capable of transporting another nucleic acid to which it has been linked. One type of vector is a “plasmid”, which refers to a circular double stranded DNA loop into which additional DNA segments can be ligated. Another type of vector is a viral vector, wherein additional DNA segments can be ligated into the viral genome. Certain vectors are capable of autonomous replication in a host cell into which they are introduced (e.g., bacterial vectors having a bacterial origin of replication and episomal mammalian vectors). Other vectors (e.g., non-episomal mammalian vectors) are integrated into the genome of a host cell upon introduction into the host cell, and thereby are replicated along with the host genome. Moreover, certain vectors are capable of directing the expression of genes to which they are operatively linked. Such vectors are referred to herein as “expression vectors”. In general, expression vectors of utility in recombinant DNA techniques are often in the form of plasmids. In the present specification, “plasmid” and “vector” can be used interchangeably as the plasmid is the most commonly used form of vector. However, the invention is intended to include such other forms of expression vectors, such as viral vectors (e.g., replication defective retroviruses, adenoviruses and adeno-associated viruses), which serve equivalent functions.

[0084] The recombinant expression vectors of the invention comprise a nucleic acid of the invention in a form suitable for expression of the nucleic acid in a host cell, which means that the recombinant expression vectors include one or more regulatory sequences, selected on the basis of the host cells to be used for expression, which is operatively linked to the nucleic acid sequence to be expressed. Within a recombinant expression vector, “operably linked” is intended to mean that the nucleotide sequence of interest is linked to the regulatory sequence(s) in a manner which allows for expression of the nucleotide sequence (e.g., in an in vitro transcription/translation system or in a host cell when the vector is introduced into the host cell). The term “regulatory sequence” is intended to include promoters, enhancers and other expression control elements (e.g., polyadenylation signals). Such regulatory sequences are described, for example, in Goeddel; Gene Expression Technology: Methods in Enzymology 185, Academic Press, San Diego, Calif. (1990). Regulatory sequences include those which direct constitutive expression of a nucleotide sequence in many types of host cell and those which direct expression of the nucleotide sequence only in certain host cells. Preferred regulatory sequences are, for example, promoters such as cos-, tac-, trp-, tet-, trp-tet-, lpp-, lac-, lpp-lac-, lacI^{q}-, T7-, T5-, T3-, gal-, trc-, ara-, SP6—, arny, SPO2, λ-P_{R}- or λP_{L}, which are used preferably in bacteria. Additional regulatory sequences are, for example, promoters from yeasts and fingi, such as ADC1, MFα, AC, P-60, CYC1, GAPDH, TEF, rp28, ADH, promoters from plants such as CaMV/35S, SSU, OCS, lib4, usp, STLS1, B33, nos or ubiquitin- or phaseolin-promoters. It is also possible to use artificial promoters. It will be appreciated by one of ordinary skill in the art that the design of the expression vector can depend on such factors as the choice of the host cell to be transformed, the level of expression of protein desired, etc. The expression vectors of the invention can be introduced into host cells to thereby produce proteins or peptides, including fusion proteins or peptides, encoded by nucleic acids as described herein (e.g., SRT proteins, mutant forms of SRT proteins, fusion proteins, etc.).

[0085] The recombinant expression vectors of the invention can be designed for expression of SRT proteins in prokaryotic or eukaryotic cells. For example, SRT genes can be expressed in bacterial cells such as C. glutamicum, insect cells (using baculovirus expression vectors), yeast and other fungal cells (see Romanos, M. A. et al. (1992) “Foreign gene expression in yeast: a review”, Yeast 8: 423-488; van den Hondel, C. A. M. J. J. et al. (1991) “Heterologous gene expression in filamentous fungi” in: More Gene Manipulations in Fungi, J. W. Bennet & L. L. Lasure, eds., p. 396-428: Academic Press: San Diego; and van den Hondel, C. A. M. J. J. & Punt, P. J. (1991) “Gene transfer systems and vector development for filamentous fungi, in: Applied Molecular Genetics of Fungi, Peberdy, J. F. et al., eds., p. 1-28, Cambridge University Press: Cambridge), algae and multicellular plant cells (see Schmidt, R. and Willmitzer, L. (1988) High efficiency Agrobacterium tumefaciens-mediated transformation of Arabidopsis thaliana leaf and cotyledon explants” Plant Cell Rep.: 583-586), or mammalian cells. Suitable host cells are discussed further in Goeddel, Gene Expression Technology: Methods in Enzymology 185, Academic Press, San Diego, Calif. (1990). Alternatively, the recombinant expression vector can be transcribed and translated in vitro, for example using T7 promoter regulatory sequences and T7 polymerase.

[0086] Expression of proteins in prokaryotes is most often carried out with vectors containing constitutive or inducible promoters directing the expression of either fusion or non-fusion proteins. Fusion vectors add a number of amino acids to a protein encoded therein, usually to the amino terminus of the recombinant protein. Such fusion vectors typically serve three purposes: 1) to increase expression of recombinant protein; 2) to increase the solubility of the recombinant protein; and 3) to aid in the purification of the recombinant protein by acting as a ligand in affinity purification. Often, in fusion expression vectors, a proteolytic cleavage site is introduced at the junction of the fusion moiety and the recombinant protein to enable separation of the recombinant protein from the fusion moiety subsequent to purification of the fusion protein. Such enzymes, and their cognate recognition sequences, include Factor Xa, thrombin and enterokinase.

[0087] Typical fusion expression vectors include pGEX (Pharmacia Biotech Inc; Smith, D. B. and Johnson, K. S. (1988) Gene 67:31-40), pMAL (New England Biolabs, Beverly, Mass.) and pRIT5 (Pharmacia, Piscataway, N.J.) which fuse glutathione S-transferase (GST), maltose E binding protein, or protein A, respectively, to the target recombinant protein. In one embodiment, the coding sequence of the SRT protein is cloned into a pGEX expression vector to create a vector encoding a fusion protein comprising, from the N-terminus to the C-terminus, GST-thrombin cleavage site-X protein. The fusion protein can be purified by affinity chromatography using glutathione-agarose resin. Recombinant SRT protein unfused to GST can be recovered by cleavage of the fusion protein with thrombin.

[0088] Examples of suitable inducible non-fusion E. coli expression vectors include pTrc (Amann et al., (1988) Gene 69:301-315) pLG338, pACYC184, pBR322, pUC18, pUC19, pKC30, pRep4, pHS1, pHS2, pPLc236, pMBL24, pLG200, pUR290, pIN-III113-B1, λgt11, pBdCl, and pET 11d (Studier et al., Gene Expression Technology: Methods in Enzymology 185, Academic Press, San Diego, Calif. (1990) 60-89; and Pouwels et al., eds. (1985) Cloning Vectors. Elsevier: New York IBSN 0 444 904018). Target gene expression from the pTrc vector relies on host RNA polymerase transcription from a hybrid trp-lac fusion promoter. Target gene expression from the pET 11d vector relies on transcription from a T7 gn10-lac fusion promoter mediated by a coexpressed viral RNA polymerase (T7 gn1). This viral polymerase is supplied by host strains BL21 (DE3) or HMS174(DE3) from a resident λ prophage harboring a T7 gn1 gene under the transcriptional control of the lacUV 5 promoter. For transformation of other varieties of bacteria, appropriate vectors may be selected. For example, the plasmids pIJ101, pIJ364, pIJ702 and pIJ361 are known to be useful in transforming Streptomyces, while plasmids pUB110, pC194, or pBD214 are suited for transformation of Bacillus species. Several plasmids of use in the transfer of genetic information into Corynebacterium include pHM1519, pBL1, pSA77, or pAJ667 (Pouwels et al., eds. (1985) Cloning Vectors. Elsevier: New York IBSN 0 444 904018).

[0089] One strategy to maximize recombinant protein expression is to express the protein in a host bacteria with an impaired capacity to proteolytically cleave the recombinant protein (Gottesman, S., Gene Expression Technology: Methods in Enzymology 185, Academic Press, San Diego, Calif. (1990) 119-128). Another strategy is to alter the nucleic acid sequence of the nucleic acid to be inserted into an expression vector so that the individual codons for each amino acid are those preferentially utilized in the bacterium chosen for expression, such as C. glutamicum(Wada et al. (1992) Nucleic Acids Res. 20:2111-2118). Such alteration of nucleic acid sequences of the invention can be carried out by standard DNA synthesis techniques.

[0090] In another embodiment, the SRT protein expression vector is a yeast expression vector. Examples of vectors for expression in yeast S. cerevisiae include pYepSec1 (Baldari, et al., (1987) Embo J. 6:229-234), 62μ, pAG-1, Yep6, Yep13, pEMBLYe23, pMFa (Kurjan and Herskowitz, (1982) Cell 30:933-943), pJRY88 (Schultz et al., (1987) Gene 54:113-123), and pYES2 (Invitrogen Corporation, San Diego, Calif.). Vectors and methods for the construction of vectors appropriate for use in other fungi, such as the filamentous fungi, include those detailed in: van den Hondel, C. A. M. J. J. & Punt, P. J. (1991) “Gene transfer systems and vector development for filamentous fungi, in: Applied Molecular Genetics of Fungi, J. F. Peberdy, et al., eds., p. 1-28, Cambridge University Press: Cambridge, and Pouwels et al., eds. (1985) Cloning Vectors. Elsevier: New York (IBSN 0 444 904018).

[0091] Alternatively, the SRT proteins of the invention can be expressed in insect cells using baculovirus expression vectors. Baculovirus vectors available for expression of proteins in cultured insect cells (e.g., Sf 9 cells) include the pAc series (Smith et al. (1983) Mol. Cell Biol. 3:2156-2165) and the pVL series (Lucklow and Summers (1989) Virology 170:31-39).

[0092] In another embodiment, the SRT proteins of the invention may be expressed in unicellular plant cells (such as algae) or in plant cells from higher plants (e.g., the spermatophytes, such as crop plants). Examples of plant expression vectors include those detailed in: Becker, D., Kemper, E., Schell, J. and Masterson, R. (1992) “New plant binary vectors with selectable markers located proximal to the left border”, Plant Mol. Biol. 20: 1195-1197; and Bevan, M. W. (1984) “Binary Agrobacterium vectors for plant transformation”, Nucl. Acid. Res. 12: 8711-8721, and include pLGV23, pGHlac+, pBIN19, pAK2004, and pDH51 (Pouwels et al., eds. (1985) Cloning Vectors. Elsevier: New York IBSN 0 444 904018).

[0093] In yet another embodiment, a nucleic acid of the invention is expressed in mammalian cells using a mammalian expression vector. Examples of mammalian expression vectors include pCDM8 (Seed, B. (1987) Nature 329:840) and pMT2PC (Kaufman et al. (1987) EMBO J. 6:187-195). When used in mammalian cells, the expression vector's control functions are often provided by viral regulatory elements. For example, commonly used promoters are derived from polyoma, Adenovirus 2, cytomegalovirus and Simian Virus 40. For other suitable expression systems for both prokaryotic and eukaryotic cells see chapters 16 and 17 of Sambrook, J., Fritsh, E. F., and Maniatis, T. Molecular Cloning: A Laboratory Manual. 2nd, ed, Cold Spring Harbor Laboratory, Cold Spring Harbor Laboratory Press, Cold Spring Harbor, N.Y., 1989.

[0094] In another embodiment, the recombinant mammalian expression vector is capable of directing expression of the nucleic acid preferentially in a particular cell type (e.g., tissue-specific regulatory elements are used to express the nucleic acid). Tissue-specific regulatory elements are known in the art. Non-limiting examples of suitable tissue-specific promoters include the albumin promoter (liver-specific; Pinkert et al. (1987) Genes Dev. 1:268-277), lymphoid-specific promoters (Calame and Eaton (1988) Adv. Immunol. 43:235-275), in particular promoters of T cell receptors (Winoto and Baltimore (1989) EMBO J. 8:729-733) and immunoglobulins (Banedji et al. (1983) Cell 33:729-740; Queen and Baltimore (1983) Cell 33:741-748), neuron-specific promoters (e.g., the neurofilament promoter; Byrne and Ruddle (1989) PNAS 86:5473-5477), pancreas-specific promoters (Edlund et al. (1985) Science 230:912-916), and mammary gland-specific promoters (e.g., milk whey promoter; U.S. Pat. No. 4,873,316 and European Application Publication No. 264, 166). Developmentally-regulated promoters are also encompassed, for example the murine hox promoters (Kessel and Gruss (1990) Science 249:374-379) and the α-fetoprotein promoter (Campes and Tilghman (1989) Genes Dev. 3:537-546).

[0095] The invention further provides a recombinant expression vector comprising a DNA molecule of the invention cloned into the expression vector in an antisense orientation. That is, the DNA molecule is operatively linked to a regulatory sequence in a manner which allows for expression (by transcription of the DNA molecule) of an RNA molecule which is antisense to SRT mRNA. Regulatory sequences operatively linked to a nucleic acid cloned in the antisense orientation can be chosen which direct the continuous expression of the antisense RNA molecule in a variety of cell types, for instance viral promoters and/or enhancers, or regulatory sequences can be chosen which direct constitutive, tissue specific or cell type specific expression of antisense RNA. The antisense expression vector can be in the form of a recombinant plasmid, phagemid or attenuated virus in which antisense nucleic acids are produced under the control of a high efficiency regulatory region, the activity of which can be determined by the cell type into which the vector is introduced. For a discussion of the regulation of gene expression using antisense genes see Weintraub, H. et al., Antisense RNA as a molecular tool for genetic analysis, Reviews—Trends in Genetics, Vol. 1(1) 1986.

[0096] Another aspect of the invention pertains to host cells into which a recombinant expression vector of the invention has been introduced. The terms “host cell” and “recombinant host cell” are used interchangeably herein. It is understood that such terms refer not only to the particular subject cell but to the progeny or potential progeny of such a cell. Because certain modifications may occur in succeeding generations due to either mutation or environmental influences, such progeny may not, in fact, be identical to the parent cell, but are still included within the scope of the term as used herein.

[0097] A host cell can be any prokaryotic or eukaryotic cell. For example, an SRT protein can be expressed in bacterial cells such as C. glutamicum, insect cells, yeast or mammalian cells (such as Chinese hamster ovary cells (CHO) or COS cells). Other suitable host cells are known to those of ordinary skill in the art. Microorganisms related to Corynebacterium glutamicum which may be conveniently used as host cells for the nucleic acid and protein molecules of the invention are set forth in Table 3.

[0098] Vector DNA can be introduced into prokaryotic or eukaryotic cells via conventional transformation or transfection techniques. As used herein, the terms “transformation” and “transfection” are intended to refer to a variety of art-recognized techniques for introducing foreign nucleic acid (e.g., linear DNA or RNA (e.g., a linearized vector or a gene construct alone without a vector) or nucleic acid in the form of a vector (e.g., a plasmid, phage, phasmid, phagemid, transposon or other DNA)) into a host cell, including calcium phosphate or calcium chloride co-precipitation, DEAE-dextran-mediated transfection, lipofection, or electroporation. Suitable methods for transforming or transfecting host cells can be found in Sambrook, et al. (Molecular Cloning: A Laboratory Manual. 2nd, ed, Cold Spring Harbor Laboratory, Cold Spring Harbor Laboratory Press, Cold Spring Harbor, N.Y., 1989), and other laboratory manuals.

[0099] For stable transfection of mammalian cells, it is known that, depending upon the expression vector and transfection technique used, only a small fraction of cells may integrate the foreign DNA into their genome. In order to identify and select these integrants, a gene that encodes a selectable marker (e.g., resistance to antibiotics) is generally introduced into the host cells along with the gene of interest. Preferred selectable markers include those which confer resistance to drugs, such as G418, hygromycin and methotrexate. Nucleic acid encoding a selectable marker can be introduced into a host cell on the same vector as that encoding an SRT protein or can be introduced on a separate vector. Cells stably transfected with the introduced nucleic acid can be identified by drug selection (e.g., cells that have incorporated the selectable marker gene will survive, while the other cells die).

[0100] To create a homologous recombinant microorganism, a vector is prepared which contains at least a portion of an SRT gene into which a deletion, addition or substitution has been introduced to thereby alter, e.g., functionally disrupt, the SRT gene. Preferably, this SRT gene is a Corynebacterium glutamicum SRT gene, but it can be a homologue from a related bacterium or even from a mammalian, yeast, or insect source. In a preferred embodiment, the vector is designed such that, upon homologous recombination, the endogenous SRT gene is functionally disrupted (i.e., no longer encodes a functional protein; also referred to as a “knock out” vector). Alternatively, the vector can be designed such that, upon homologous recombination, the endogenous SRT gene is mutated or otherwise altered but still encodes functional protein (e.g., the upstream regulatory region can be altered to thereby alter the expression of the endogenous SRT protein). In the homologous recombination vector, the altered portion of the SRT gene is flanked at its 5′ and 3′ ends by additional nucleic acid of the SRT gene to allow for homologous recombination to occur between the exogenous SRT gene carried by the vector and an endogenous SRT gene in a microorganism. The additional flanking SRT nucleic acid is of sufficient length for successful homologous recombination with the endogenous gene. Typically, several kilobases of flanking DNA (both at the 5′ and 3′ ends) are included in the vector (see e.g., Thomas, K. R., and Capecchi, M. R. (1987) Cell 51: 503 for a description of homologous recombination vectors). The vector is introduced into a microorganism (e.g., by electroporation) and cells in which the introduced SRT gene has homologously recombined with the endogenous SRT gene are selected, using art-known techniques.

[0101] In another embodiment, recombinant microorganisms can be produced which contain selected systems which allow for regulated expression of the introduced gene. For example, inclusion of an SRT gene on a vector placing it under control of the lac operon permits expression of the SRT gene only in the presence of IPTG. Such regulatory systems are well known in the art.

[0102] In another embodiment, an endogenous SRT gene in a host cell is disrupted (e.g., by homologous recombination or other genetic means known in the art) such that expression of its protein product does not occur. In another embodiment, an endogenous or introduced SRT gene in a host cell has been altered by one or more point mutations, deletions, or inversions, but still encodes a functional SRT protein. In still another embodiment, one or more of the regulatory regions (e.g., a promoter, repressor, or inducer) of an SRT gene in a microorganism has been altered (e.g., by deletion, truncation, inversion, or point mutation) such that the expression of the SRT gene is modulated. One of ordinary skill in the art will appreciate that host cells containing more than one of the described SRT gene and protein modifications may be readily produced using the methods of the invention, and are meant to be included in the present invention.

[0103] A host cell of the invention, such as a prokaryotic or eukaryotic host cell in culture, can be used to produce (i.e., express) an SRT protein. Accordingly, the invention further provides methods for producing SRT proteins using the host cells of the invention. In one embodiment, the method comprises culturing the host cell of invention (into which a recombinant expression vector encoding an SRT protein has been introduced, or into which genome has been introduced a gene encoding a wild-type or altered SRT protein) in a suitable medium until SRT protein is produced. In another embodiment, the method further comprises isolating SRT proteins from the medium or the host cell.

C. Isolated SRT Proteins

[0104] Another aspect of the invention pertains to isolated SRT proteins, and biologically active portions thereof. An “isolated” or “purified” protein or biologically active portion thereof is substantially free of cellular material when produced by recombinant DNA techniques, or chemical precursors or other chemicals when chemically synthesized. The language “substantially free of cellular material” includes preparations of SRT protein in which the protein is separated from cellular components of the cells in which it is naturally or recombinantly produced. In one embodiment, the language “substantially free of cellular material” includes preparations of SRT protein having less than about 30% (by dry weight) of non-SRT protein (also referred to herein as a “contaminating protein”), more preferably less than about 20% of non-SRT protein, still more preferably less than about 10% of non-SRT protein, and most preferably less than about 5% non-SRT protein. When the SRT protein or biologically active portion thereof is recombinantly produced, it is also preferably substantially free of culture medium, i.e., culture medium represents less than about 20%, more preferably less than about 10%, and most preferably less than about 5% of the volume of the protein preparation. The language “substantially free of chemical precursors or other chemicals” includes preparations of SRT protein in which the protein is separated from chemical precursors or other chemicals which are involved in the synthesis of the protein. In one embodiment, the language “substantially free of chemical precursors or other chemicals” includes preparations of SRT protein having less than about 30% (by dry weight) of chemical precursors or non-SRT chemicals, more preferably less than about 20% chemical precursors or non-SRT chemicals, still more preferably less than about 10% chemical precursors or non-SRT chemicals, and most preferably less than about 5% chemical precursors or non-SRT chemicals. In preferred embodiments, isolated proteins or biologically active portions thereof lack contaminating proteins from the same organism from which the SRT protein is derived. Typically, such proteins are produced by recombinant expression of, for example, a C. glutamicum SRT protein in a microorganism such as C. glutamicum.

[0105] An isolated SRT protein or a portion thereof of the invention can contribute to the resistance or tolerance of C. glutamicum to one or more chemical or environmental stresses or hazards, or has one or more of the activities set forth in Table 1. In preferred embodiments, the protein or portion thereof comprises an amino acid sequence which is sufficiently homologous to an amino acid sequence of Appendix B such that the protein or portion thereof maintains the ability to mediate the resistance or tolerance of C. glutamicum to one or more chemical or environmental stresses or hazards. The portion of the protein is preferably a biologically active portion as described herein. In another preferred embodiment, an SRT protein of the invention has an amino acid sequence shown in Appendix B. In yet another preferred embodiment, the SRT protein has an amino acid sequence which is encoded by a nucleotide sequence which hybridizes, e.g., hybridizes under stringent conditions, to a nucleotide sequence of Appendix A. In still another preferred embodiment, the SRT protein has an amino acid sequence which is encoded by a nucleotide sequence that is at least about 50%, 51%, 52%, 53%, 54%, 55%, 56%, 57%, 58%, 59%, or 60%, preferably at least about 61%, 62%, 63%, 64%, 65%, 66%, 67%, 68%, 69%, or 70%, more preferably at least about 71%, 72%, 73%, 74%, 75%, 76%, 77%, 78%, 79%, or 80%, 81%, 82%, 83%, 84%, 85%, 86%, 87%, 88%, 89%, or 90%, or 91%, 92%, 93%, 94%, and even more preferably at least about 95%, 96%, 97%, 98%, 99% or more homologous to one of the nucleic acid sequences of Appendix A, or a portion thereof. Ranges and identity values intermediate to the above-recited values, (e.g., 70-90% identical or 80-95% identical) are also intended to be encompassed by the present invention. For example, ranges of identity values using a combination of any of the above values recited as upper and/or lower limits are intended to be included. The preferred SRT proteins of the present invention also preferably possess at least one of the SRT activities described herein. For example, a preferred SRT protein of the present invention includes an amino acid sequence encoded by a nucleotide sequence which hybridizes, e.g., hybridizes under stringent conditions, to a nucleotide sequence of Appendix A, and which can increase the resistance or tolerance of C. glutamicum to one or more environmental or chemical stresses, or which has one or more of the activities set forth in Table 1.

[0106] In other embodiments, the SRT protein is substantially homologous to an amino acid sequence of Appendix B and retains the functional activity of the protein of one of the sequences of Appendix B yet differs in amino acid sequence due to natural variation or mutagenesis, as described in detail in subsection I above. Accordingly, in another embodiment, the SRT protein is a protein which comprises an amino acid sequence which is at least about 50%, 51%, 52%, 53%, 54%, 55%, 56%, 57%, 58%, 59%, or 60%, preferably at least about 61%, 62%, 63%, 64%, 65%, 66%, 67%, 68%, 69%, or 70%, more preferably at least about 71%, 72%, 73%, 74%, 75%, 76%, 77%, 78%, 79%, or 80%, 81%, 82%, 83%, 84%, 85%, 86%, 87%, 88%, 89%, or 90%, or 91%, 92%, 93%, 94%, and even more preferably at least about 95%, 96%, 97%, 98%, 99% or more homologous to an entire amino acid sequence of Appendix B and which has at least one of the SRT activities described herein. Ranges and identity values intermediate to the above-recited values, (e.g., 70-90% identical or 80-95% identical) are also intended to be encompassed by the present invention. For example, ranges of identity values using a combination of any of the above values recited as upper and/or lower limits are intended to be included. In another embodiment, the invention pertains to a full length C. glutamicum protein which is substantially homologous to an entire amino acid sequence of Appendix B.

[0107] Biologically active portions of an SRT protein include peptides comprising amino acid sequences derived from the amino acid sequence of an SRT protein, e.g., an amino acid sequence shown in Appendix B or the amino acid sequence of a protein homologous to an SRT protein, which include fewer amino acids than a full length SRT protein or the full length protein which is homologous to an SRT protein, and exhibit at least one activity of an SRT protein. Typically, biologically active portions (peptides, e.g., peptides which are, for example, 5, 10, 15, 20, 30, 35, 36, 37, 38, 39, 40, 50, 100 or more amino acids in length) comprise a domain or motif with at least one activity of an SRT protein. Moreover, other biologically active portions, in which other regions of the protein are deleted, can be prepared by recombinant techniques and evaluated for one or more of the activities described herein. Preferably, the biologically active portions of an SRT protein include one or more selected domains/motifs or portions thereof having biological activity.

[0108] SRT proteins are preferably produced by recombinant DNA techniques. For example, a nucleic acid molecule encoding the protein is cloned into an expression vector (as described above), the expression vector is introduced into a host cell (as described above) and the SRT protein is expressed in the host cell. The SRT protein can then be isolated from the cells by an appropriate purification scheme using standard protein purification techniques. Alternative to recombinant expression, an SRT protein, polypeptide, or peptide can be synthesized chemically using standard peptide synthesis techniques. Moreover, native SRT protein can be isolated from cells (e.g., endothelial cells), for example using an anti-SRT antibody, which can be produced by standard techniques utilizing an SRT protein or fragment thereof of this invention.

[0109] The invention also provides SRT chimeric or fusion proteins. As used herein, an SRT “chimeric protein” or “fusion protein” comprises an SRT polypeptide operatively linked to a non-SRT polypeptide. An “SRT polypeptide” refers to a polypeptide having an amino acid sequence corresponding to SRT, whereas a “non-SRT polypeptide” refers to a polypeptide having an amino acid sequence corresponding to a protein which is not substantially homologous to the SRT protein, e.g., a protein which is different from the SRT protein and which is derived from the same or a different organism. Within the fusion protein, the term “operatively linked” is intended to indicate that the SRT polypeptide and the non-SRT polypeptide are fused in-frame to each other. The non-SRT polypeptide can be fused to the N-terminus or C-terminus of the SRT polypeptide. For example, in one embodiment the fusion protein is a GST-SRT fusion protein in which the SRT sequences are fused to the C-terminus of the GST sequences. Such fusion proteins can facilitate the purification of recombinant SRT proteins. In another embodiment, the fusion protein is an SRT protein containing a heterologous signal sequence at its N-terminus. In certain host cells (e.g., mammalian host cells), expression and/or secretion of an SRT protein can be increased through use of a heterologous signal sequence.

[0110] Preferably, an SRT chimeric or fusion protein of the invention is produced by standard recombinant DNA techniques. For example, DNA fragments coding for the different polypeptide sequences are ligated together in-frame in accordance with conventional techniques, for example by employing blunt-ended or stagger-ended termini for ligation, restriction enzyme digestion to provide for appropriate termini, filling-in of cohesive ends as appropriate, alkaline phosphatase treatment to avoid undesirable joining, and enzymatic ligation. In another embodiment, the fusion gene can be synthesized by conventional techniques including automated DNA synthesizers. Alternatively, PCR amplification of gene fragments can be carried out using anchor primers which give rise to complementary overhangs between two consecutive gene fragments which can subsequently be annealed and reamplified to generate a chimeric gene sequence (see, for example, Current Protocols in Molecular Biology, eds. Ausubel et al. John Wiley & Sons: 1992). Moreover, many expression vectors are commercially available that already encode a fusion moiety (e.g., a GST polypeptide). An SRT-encoding nucleic acid can be cloned into such an expression vector such that the fusion moiety is linked in-frame to the SRT protein.

[0111] Homologues of the SRT protein can be generated by mutagenesis, e.g., discrete point mutation or truncation of the SRT protein. As used herein, the term “homologue” refers to a variant form of the SRT protein which acts as an agonist or antagonist of the activity of the SRT protein. An agonist of the SRT protein can retain substantially the same, or a subset, of the biological activities of the SRT protein. An antagonist of the SRT protein can inhibit one or more of the activities of the naturally occurring form of the SRT protein, by, for example, competitively binding to a downstream or upstream member of the SRT system which includes the SRT protein. Thus, the C. glutamicum SRT protein and homologues thereof of the present invention may increase the tolerance or resistance of C. glutamicum to one or more chemical or environmental stresses.

[0112] In an alternative embodiment, homologues of the SRT protein can be identified by screening combinatorial libraries of mutants, e.g., truncation mutants, of the SRT protein for SRT protein agonist or antagonist activity. In one embodiment, a variegated library of SRT variants is generated by combinatorial mutagenesis at the nucleic acid level and is encoded by a variegated gene library. A variegated library of SRT variants can be produced by, for example, enzymatically ligating a mixture of synthetic oligonucleotides into gene sequences such that a degenerate set of potential SRT sequences is expressible as individual polypeptides, or alternatively, as a set of larger fusion proteins (e.g., for phage display) containing the set of SRT sequences therein. There are a variety of methods which can be used to produce libraries of potential SRT homologues from a degenerate oligonucleotide sequence. Chemical synthesis of a degenerate gene sequence can be performed in an automatic DNA synthesizer, and the synthetic gene then ligated into an appropriate expression vector. Use of a degenerate set of genes allows for the provision, in one mixture, of all of the sequences encoding the desired set of potential SRT sequences. Methods for synthesizing degenerate oligonucleotides are known in the art (see, e.g., Narang, S. A. (1983) Tetrahedron 39:3; Itakura et al. (1984) Annu. Rev. Biochem. 53:323; Itakura et al. (1984) Science 198:1056; Ike et al. (1983) Nucleic Acid Res. 11:477.

[0113] In addition, libraries of fragments of the SRT protein coding can be used to generate a variegated population of SRT fragments for screening and subsequent selection of homologues of an SRT protein. In one embodiment, a library of coding sequence fragments can be generated by treating a double stranded PCR fragment of an SRT coding sequence with a nuclease under conditions wherein nicking occurs only about once per molecule, denaturing the double stranded DNA, renaturing the DNA to form double stranded DNA which can include sense/antisense pairs from different nicked products, removing single stranded portions from reformed duplexes by treatment with S1 nuclease, and ligating the resulting fragment library into an expression vector. By this method, an expression library can be derived which encodes N-terminal, C-terminal and internal fragments of various sizes of the SRT protein.

[0114] Several techniques are known in the art for screening gene products of combinatorial libraries made by point mutations or truncation, and for screening cDNA libraries for gene products having a selected property. Such techniques are adaptable for rapid screening of the gene libraries generated by the combinatorial mutagenesis of SRT homologues. The most widely used techniques, which are amenable to high through-put analysis, for screening large gene libraries typically include cloning the gene library into replicable expression vectors, transforming appropriate cells with the resulting library of vectors, and expressing the combinatorial genes under conditions in which detection of a desired activity facilitates isolation of the vector encoding the gene whose product was detected. Recursive ensemble mutagenesis (REM), a new technique which enhances the frequency of functional mutants in the libraries, can be used in combination with the screening assays to identify SRT homologues (Arkin and Yourvan (1992) PNAS 89:7811-7815; Delgrave et al. (1993) Protein Engineering 6(3):327-331).

[0115] In another embodiment, cell based assays can be exploited to analyze a variegated SRT library, using methods well known in the art.

D. Uses and Methods of the Invention

[0116] The nucleic acid molecules, proteins, protein homologues, fusion proteins, primers, vectors, and host cells described herein can be used in one or more of the following methods: identification of C. glutamicum and related organisms; mapping of genomes of organisms related to C. glutamicum; identification and localization of C. glutamicum sequences of interest; evolutionary studies; determination of SRT protein regions required for function; modulation of an SRT protein activity; modulation of the activity of an SRT pathway; and modulation of cellular production of a desired compound, such as a fine chemical.

[0117] The SRT nucleic acid molecules of the invention have a variety of uses. First, they may be used to identify an organism as being Corynebacterium glutamicum or a close relative thereof. Also, they may be used to identify the presence of C. glutamicum or a relative thereof in a mixed population of microorganisms. The invention provides the nucleic acid sequences of a number of C. glutamicum genes; by probing the extracted genomic DNA of a culture of a unique or mixed population of microorganisms under stringent conditions with a probe spanning a region of a C. glutamicum gene which is unique to this organism, one can ascertain whether this organism is present.

[0118] Although Corynebacterium glutamicum itself is nonpathogenic, it is related to pathogenic species, such as Corynebacterium diphtheriae. Corynebacterium diphtheriae is the causative agent of diphtheria, a rapidly developing, acute, febrile infection which involves both local and systemic pathology. In this disease, a local lesion develops in the upper respiratory tract and involves necrotic injury to epithelial cells; the bacilli secrete toxin which is disseminated through this lesion to distal susceptible tissues of the body. Degenerative changes brought about by the inhibition of protein synthesis in these tissues, which include heart, muscle, peripheral nerves, adrenals, kidneys, liver and spleen, result in the systemic pathology of the disease. Diphtheria continues to have high incidence in many parts of the world, including Africa, Asia, Eastern Europe and the independent states of the former Soviet Union. An ongoing epidemic of diphtheria in the latter two regions has resulted in at least 5,000 deaths since 1990.

[0119] In one embodiment, the invention provides a method of identifying the presence or activity of Cornyebacterium diphtheriae in a subject. This method includes detection of one or more of the nucleic acid or amino acid sequences of the invention (e.g., the sequences set forth in Appendix A or Appendix B) in a subject, thereby detecting the presence or activity of Corynebacterium diphtheriae in the subject. C. glutamicum and C. diphtheriae are related bacteria, and many of the nucleic acid and protein molecules in C. glutamicum are homologous to C. diphtheriae nucleic acid and protein molecules, and can therefore be used to detect C. diphtheriae in a subject.

[0120] The nucleic acid and protein molecules of the invention may also serve as markers for specific regions of the genome. This has utility not only in the mapping of the genome, but also for functional studies of C. glutamicum proteins. For example, to identify the region of the genome to which a particular C. glutamicum DNA-binding protein binds, the C. glutamicum genome could be digested, and the fragments incubated with the DNA-binding protein. Those which bind the protein may be additionally probed with the nucleic acid molecules of the invention, preferably with readily detectable labels; binding of such a nucleic acid molecule to the genome fragment enables the localization of the fragment to the genome map of C. glutamicum, and, when performed multiple times with different enzymes, facilitates a rapid determination of the nucleic acid sequence to which the protein binds. Further, the nucleic acid molecules of the invention may be sufficiently homologous to the sequences of related species such that these nucleic acid molecules may serve as markers for the construction of a genomic map in related bacteria, such as Brevibacterium lactofermentum.

[0121] The SRT nucleic acid molecules of the invention are also useful for evolutionary and protein structural studies. The resistance processes in which the molecules of the invention participate are utilized by a wide variety of cells; by comparing the sequences of the nucleic acid molecules of the present invention to those encoding similar enzymes from other organisms, the evolutionary relatedness of the organisms can be assessed. Similarly, such a comparison permits an assessment of which regions of the sequence are conserved and which are not, which may aid in determining those regions of the protein which are essential for the functioning of the enzyme. This type of determination is of value for protein engineering studies and may give an indication of what the protein can tolerate in terms of mutagenesis without losing function.

[0122] The genes of the invention, e.g., the gene encoding LMRB (SEQ ID NO:1) or other gene of the invention encoding a chemical or environmental resistance or tolerance protein (e.g., resistance against one or more antibiotics), may be used as genetic markers for the genetic transformation of (e.g., the transfer of additional genes into or disruption of preexisting genes of) organisms such as C. glutamicum or other bacterial species. Use of these nucleic acid molecules permits efficient selection of organisms which have incorporated a given transgene cassette (e.g., a plasmid, phage, phasmid, phagemid, transposon, or other nucleic acid element), based on a trait which permits the survival of the organism in an otherwise hostile or toxic environment (e.g., in the presence of an antimicrobial compound). By employing one or more of the genes of the invention as genetic markers, the speed and ease with which organisms having desirable transformed traits (e.g., modulated fine chemical production) are engineered and isolated are improved. While it is advantageous to use the genes of the invention for selection of transformed C. glutamicum and related bacteria, it is possible, as described herein, to use homologs (e.g., homologs from other organisms), allelic variants or fragments of the gene retaining desired activity. Furthermore, 5′ and 3′ regulatory elements of the genes of the invention may be modified as described herein (e.g., by nucleotide substitution, insertion, deletion, or replacement with a more desirable genetic element) to modulate the transcription of the gene. For example, an LMRB variant in which the nucleotide sequence in the region from −1 to −200 5′ to the start codon has been altered to modulate (preferably increase) the transcription and/or translation of LMRB may be employed, as can constructs in which a gene of the invention (e.g., the LMRB gene (SEQ ID NO:1)) is functionally coupled to one or more regulatory signals (e.g., inducer or repressor binding sequences) which can be used for modulating gene expression. Similarly, more than one copy of a gene (functional or inactivated) of the invention may be employed.

[0123] An additional application of the genes of the invention (e.g., the gene encoding LMRB (SEQ ID NO:1) or other drug- or antibiotic-resistance gene) is in the discovery of new antibiotics which are active against Corynebacteria and/or other bacteria. For example, a gene of the invention may be expressed (or overexpressed) in a suitable host to generate an organism with increased resistance to one or more drugs or antibiotics (in the case of LMRB, lincosamides in particular, especially lincomycin). This type of resistant host can subsequently be used to screen for chemicals with bacteriostatic and/or bacteriocidal activity, such as novel antibiotic compounds. It is possible, in particular, to use the genes of the invention (e.g., the LMRB gene) to identify new antibiotics which are active against those microorganisms which are already resistant to standard antibiotic compounds.

[0124] The invention provides methods for screening molecules which modulate the activity of an SRT protein, either by interacting with the protein itself or a substrate or binding partner of the SRT protein, or by modulating the transcription or translation of a SRT nucleic acid molecule of the invention. In such methods, a microorganism expressing one or more SRT proteins of the invention is contacted with one or more test compounds, and the effect of each test compound on the activity or level of expression of the SRT protein is assessed.

[0125] Manipulation of the SRT nucleic acid molecules of the invention may result in the production of SRT proteins having functional differences from the wild-type SRT proteins. These proteins may be improved in efficiency or activity, may be present in greater numbers in the cell than is usual, or may be decreased in efficiency or activity. The goal of such manipulations is to increase the viability and activity of the cell when the cell is exposed to the environmental and chemical stresses and hazards which frequently accompany large-scale fermentative culture. Thus, by increasing the activity or copy number of a heat-shock-regulated protease, one may increase the ability of the cell to destroy incorrectly folded proteins, which may otherwise interfere with normal cellular functioning (for example, by continuing to bind substrates or cofactors although the protein lacks the activity to act on these molecules appropriately). The same is true for the overexpression or optimization of activity of one or more chaperone molecules induced by heat or cold shock. These proteins aid in the correct folding of nascent polypeptide chains, and thus their increased activity or presence should increase the percentage of correctly folded proteins in the cell, which in turn should increase the overall metabolic efficiency and viability of the cells in culture. The overexpression or optimization of the transporter molecules activated by osmotic shock should result in an increased ability on the part of the cell to maintain intracellular homeostasis, thereby increasing the viability of these cells in culture. Similarly, the overproduction or increase in activity by mutagenesis of proteins involved in the development of cellular resistance to chemical stresses of various kinds (either by transport of the offending chemical out of the cell or by modification of the chemical to a less hazardous substance) should increase the fitness of the organism in the environment containing the hazardous substance (i.e., large-scale fermentative culture), and thereby may permit relatively larger numbers of cells to survive in such a culture. The net effect of all of these mutagenesis strategies is to increase the quantity of fine-chemical-producing compounds in the culture, thereby increasing the yield, production, and/or efficiency of production of one or more desired fine chemicals from the culture.

[0126] This aforementioned list of mutagenesis strategies for SRT proteins to result in increased yields of a desired compound is not meant to be limiting; variations on these mutagenesis strategies will be readily apparent to one of ordinary skill in the art. By these mechanisms, the nucleic acid and protein molecules of the invention may be utilized to generate C. glutamicum or related strains of bacteria expressing mutated SRT nucleic acid and protein molecules such that the yield, production, and/or efficiency of production of a desired compound is improved. This desired compound may be any natural product of C. glutamicum, which includes the final products of biosynthesis pathways and intermediates of naturally-occurring metabolic pathways, as well as molecules which do not naturally occur in the metabolism of C. glutamicum, but which are produced by a C. glutamicum strain of the invention.

[0127] This invention is further illustrated by the following examples which should not be construed as limiting. The contents of all references, patent applications, patents, published patent applications, Tables, Appendices, and the sequence listing cited throughout this application are hereby incorporated by reference.

### EXEMPLIFICATION

### Example 1

### Preparation of Total Genomic DNA of Corynebacterium glutamicum ATCC 13032

[0128] A culture of Corynebacterium glutamicum (ATCC 13032) was grown overnight at 30° C. with vigorous shaking in BHI medium (Difco). The cells were harvested by centrifugation, the supernatant was discarded and the cells were resuspended in 5 ml buffer-I (5% of the original volume of the culture—all indicated volumes have been calculated for 100 ml of culture volume). Composition of buffer-I: 140.34 g/l sucrose, 2.46 g/l MgSO₄×7H₂O, 10 ml/l KH₂PO₄ solution (100 g/l, adjusted to pH 6.7 with KOH), 50 ml/l M12 concentrate (10 g/l (NH₄)₂SO₄, 1 g/l NaCl, 2 g/l MgSO₄×7H₂O, 0.2 g/l CaCl₂, 0.5 g/l yeast extract (Difco), 10 ml/l trace-elements-mix (200 mg/l FeSO₄×H₂O, 10 mg/l ZnSO₄×7H₂O, 3 mg/l MnCl₂×4H₂O, 30 mg/l H₃BO₃ 20 mg/l CoCl₂×6H₂O, 1 mg/l NiCl₂×6H₂O, 3 mg/l Na₂MoO₄×2H₂O, 500 mg/l complexing agent (EDTA or critic acid), 100 ml/l vitamins-mix (0.2 mg/l biotin, 0.2 mg/l folic acid, 20 mg/l p-amino benzoic acid, 20 mg/l riboflavin, 40 mg/l α-panthothenate, 140 mg/l nicotinic acid, 40 mg/l pyridoxole hydrochloride, 200 mg/l myo-inositol). Lysozyme was added to the suspension to a final concentration of 2.5 mg/ml. After an approximately 4 h incubation at 37° C., the cell wall was degraded and the resulting protoplasts are harvested by centrifugation. The pellet was washed once with 5 ml buffer-I and once with 5 ml TE-buffer (10 mM Tris-HCl, 1 mM EDTA, pH 8). The pellet was resuspended in 4 ml TE-buffer and 0.5 ml SDS solution (10%) and 0.5 ml NaCl solution (5 M) are added. After adding of proteinase K to a final concentration of 200 μg/ml, the suspension is incubated for ca.18 h at 37° C. The DNA was purified by extraction with phenol, phenol-chloroform-isoamylalcohol and chloroform-isoamylalcohol using standard procedures. Then, the DNA was precipitated by adding 1/50 volume of 3 M sodium acetate and 2 volumes of ethanol, followed by a 30 min incubation at −20° C. and a 30 min centrifugation at 12,000 rpm in a high speed centrifuge using a SS34 rotor (Sorvall). The DNA was dissolved in 1 ml TE-buffer containing 20 μg/ml RNaseA and dialysed at 4° C. against 1000 ml TE-buffer for at least 3 hours. During this time, the buffer was exchanged 3 times. To aliquots of 0.4 ml of the dialysed DNA solution, 0.4 ml of 2 M LiCl and 0.8 ml of ethanol are added. After a 30 min incubation at −20° C., the DNA was collected by centrifugation (13,000 rpm, Biofuge Fresco, Heraeus, Hanau, Germany). The DNA pellet was dissolved in TE-buffer. DNA prepared by this procedure could be used for all purposes, including southern blotting or construction of genomic libraries.

### Example 2

### Construction of Genomic Libraries in Escherichia coli of Corynebacterium glutamicum ATCC13032

[0129] Using DNA prepared as described in Example 1, cosmid and plasmid libraries were constructed according to known and well established methods (see e.g., Sambrook, J. et al. (1989) “Molecular Cloning: A Laboratory Manual”, Cold Spring Harbor Laboratory Press, or Ausubel, F. M. et al. (1994) “Current Protocols in Molecular Biology”, John Wiley & Sons.)

[0130] Any plasmid or cosmid could be used. Of particular use were the plasmids pBR322 (Sutcliffe, J. G. (1979) Proc. Natl. Acad. Sci. USA, 75:3737-3741); pACYC177 (Change & Cohen (1978) J. Bacteriol 134:1141-1156), plasmids of the pBS series (pBSSK+, pBSSK− and others; Stratagene, LaJolla, USA), or cosmids as SuperCos1 (Stratagene, LaJolla, USA) or Lorist6 (Gibson, T. J., Rosenthal A. and Waterson, R. H. (1987) Gene 53:283-286. Gene libraries specifically for use in C. glutamicum may be constructed using plasmid pSL109 (Lee, H.-S. and A. J. Sinskey (1994) J. Microbiol. Biotechnol. 4: 256-263).

### Example 3

### DNA Sequencing and Computational Functional Analysis

[0131] Genomic libraries as described in Example 2 were used for DNA sequencing according to standard methods, in particular by the chain termination method using AB1377 sequencing machines (see e.g., Fleischman, R. D. et al. (1995) “Whole-genome Random Sequencing and Assembly of Haemophilus Influenzae Rd., Science, 269:496-512). Sequencing primers with the following nucleotide sequences were used: 5′-GGAAACAGTATGACCATG-3′ or 5′-GTAAAACGACGGCCAGT-3′.

### Example 4

### In Vivo Mutagenesis

[0132] In vivo mutagenesis of Corynebacterium glutamicum can be performed by passage of plasmid (or other vector) DNA through E. coli or other microorganisms (e.g. Bacillus spp. or yeasts such as Saccharomyces cerevisiae) which are impaired in their capabilities to maintain the integrity of their genetic information. Typical mutator strains have mutations in the genes for the DNA repair system (e.g., mutHLS, mutD, mutT, etc.; for reference, see Rupp, W. D. (1996) DNA repair mechanisms, in: Escherichia coli and Salmonella, p. 2277-2294, ASM: Washington.) Such strains are well known to those of ordinary skill in the art. The use of such strains is illustrated, for example, in Greener, A. and Callahan, M. (1994) Strategies_{—}7: 32-34.

### Example 5

### DNA Transfer Between Escherichia coli and Corynebacterium glutamicum

[0133] Several Corynebacterium and Brevibacterium species contain endogenous plasmids (as e.g., pHM1519 or pBL1) which replicate autonomously (for review see, e.g., Martin, J. F. et al. (1987) Biotechnology, 5:137-146). Shuttle vectors for Escherichia coli and Corynebacterium glutamicum can be readily constructed by using standard vectors for E. coli (Sambrook, J. et al. (1989), “Molecular Cloning: A Laboratory Manual”, Cold Spring Harbor Laboratory Press or Ausubel, F. M. et al. (1994) “Current Protocols in Molecular Biology”, John Wiley & Sons) to which a origin or replication for and a suitable marker from Corynebacterium glutamicum is added. Such origins of replication are preferably taken from endogenous plasmids isolated from Corynebacterium and Brevibacterium species. Of particular use as transformation markers for these species are genes for kanamycin resistance (such as those derived from the Tn5 or Tn903 transposons) or chloramphenicol (Winnacker, E. L. (1987) “From Genes to Clones—Introduction to Gene Technology, VCH, Weinheim). There are numerous examples in the literature of the construction of a wide variety of shuttle vectors which replicate in both E. coli and C. glutamicum, and which can be used for several purposes, including gene over-expression (for reference, see e.g., Yoshihama, M. et al. (1985) J. Bacteriol. 162:591-597, Martin J. F. et al. (1987) Biotechnology, 5:137-146 and Eikmanns, B. J. et al. (1991) Gene, 102:93-98).

[0134] Using standard methods, it is possible to clone a gene of interest into one of the shuttle vectors described above and to introduce such a hybrid vector into strains of Corynebacterium glutamicum. Transformation of C. glutamicum can be achieved by protoplast transformation (Kastsumata, R. et al. (1984) J. Bacteriol. 159306-311), electroporation (Liebl, E. et al. (1989) FEMS Microbiol. Letters, 53:399-303) and in cases where special vectors are used, also by conjugation (as described e.g. in Schafer, A et al. (1990) J. Bacteriol. 172:1663-1666). It is also possible to transfer the shuttle vectors for C. glutamicum to E. coli by preparing plasmid DNA from C. glutamicum (using standard methods well-known in the art) and transforming it into E. coli. This transformation step can be performed using standard methods, but it is advantageous to use an Mcr-deficient E. coli strain, such as NM522 (Gough & Murray (1983) J. Mol. Biol. 166:1-19).

[0135] Genes may be overexpressed in C. glutamicum strains using plasmids which comprise pCG1 (U.S. Pat. No. 4,617,267) or fragments thereof, and optionally the gene for kanamycin resistance from TN903 (Grindley, N. D. and Joyce, C. M. (1980) Proc. Natl. Acad. Sci. USA 77(12): 7176-7180). In addition, genes may be overexpressed in C. glutamicum strains using plasmid pSL109 (Lee, H.-S. and A. J. Sinskey (1994) J. Microbiol. Biotechnol. 4: 256-263).

[0136] Aside from the use of replicative plasmids, gene overexpression can also be achieved by integration into the genome. Genomic integration in C. glutamicum or other Corynebacterium or Brevibacterium species may be accomplished by well-known methods, such as homologous recombination with genomic region(s), restriction endonuclease mediated integration (REMI) (see, e.g., DE Patent 19823834), or through the use of transposons. It is also possible to modulate the activity of a gene of interest by modifying the regulatory regions (e.g., a promoter, a repressor, and/or an enhancer) by sequence modification, insertion, or deletion using site-directed methods (such as homologous recombination) or methods based on random events (such as transposon mutagenesis or REMI). Nucleic acid sequences which function as transcriptional terminators may also be inserted 3′ to the coding region of one or more genes of the invention; such terminators are well-known in the art and are described, for example, in Winnacker, E. L. (1987) From Genes to Clones—Introduction to Gene Technology. VCH: Weinheim.

### Example 6

### Assessment of the Expression of the Mutant Protein

[0137] Observations of the activity of a mutated protein in a transformed host cell rely on the fact that the mutant protein is expressed in a similar fashion and in a similar quantity to that of the wild-type protein. A useful method to ascertain the level of transcription of the mutant gene (an indicator of the amount of mRNA available for translation to the gene product) is to perform a Northern blot (for reference see, for example, Ausubel et al. (1988) Current Protocols in Molecular Biology, Wiley: New York), in which a primer designed to bind to the gene of interest is labeled with a detectable tag (usually radioactive or chemiluminescent), such that when the total RNA of a culture of the organism is extracted, run on gel, transferred to a stable matrix and incubated with this probe, the binding and quantity of binding of the probe indicates the presence and also the quantity of mRNA for this gene. This information is evidence of the degree of transcription of the mutant gene. Total cellular RNA can be prepared from Corynebacterium glutamicum by several methods, all well-known in the art, such as that described in Bormann, E. R. et al. (1992) Mol. Microbiol. 6: 317-326.

[0138] To assess the presence or relative quantity of protein translated from this mRNA, standard techniques, such as a Western blot, may be employed (see, for example, Ausubel et al. (1988) Current Protocols in Molecular Biology, Wiley: New York). In this process, total cellular proteins are extracted, separated by gel electrophoresis, transferred to a matrix such as nitrocellulose, and incubated with a probe, such as an antibody, which specifically binds to the desired protein. This probe is generally tagged with a chemiluminescent or calorimetric label which may be readily detected. The presence and quantity of label observed indicates the presence and quantity of the desired mutant protein present in the cell.

### Example 7

### Growth of Genetically Modified Corynebacterium glutamicum —Media and Culture Conditions

[0139] Genetically modified Corynebacteria are cultured in synthetic or natural growth media. A number of different growth media for Corynebacteria are both well-known and readily available (Lieb et al. (1989) Appl. Microbiol. Biotechnol., 32:205-210; von der Osten et al. (1998) Biotechnology Letters, 11:11-16; U.S. Pat. No. DE 4,120,867; Liebl (1992) “The Genus Corynebacterium, in: The Procaryotes, Volume II, Balows, A. et al., eds. Springer-Verlag). These media consist of one or more carbon sources, nitrogen sources, inorganic salts, vitamins and trace elements. Preferred carbon sources are sugars, such as mono-, di-, or polysaccharides. For example, glucose, fructose, mannose, galactose, ribose, sorbose, ribulose, lactose, maltose, sucrose, raffinose, starch or cellulose serve as very good carbon sources. It is also possible to supply sugar to the media via complex compounds such as molasses or other by-products from sugar refinement. It can also be advantageous to supply mixtures of different carbon sources. Other possible carbon sources are alcohols and organic acids, such as methanol, ethanol, acetic acid or lactic acid. Nitrogen sources are usually organic or inorganic nitrogen compounds, or materials which contain these compounds. Exemplary nitrogen sources include ammonia gas or ammonia salts, such as NH₄Cl or (NH₄)₂SO₄, NH₄OH, nitrates, urea, amino acids or complex nitrogen sources like corn steep liquor, soy bean flour, soy bean protein, yeast extract, meat extract and others.

[0140] Inorganic salt compounds which may be included in the media include the chloride-, phosphorous- or sulfate-salts of calcium, magnesium, sodium, cobalt, molybdenum, potassium, manganese, zinc, copper and iron. Chelating compounds can be added to the medium to keep the metal ions in solution. Particularly useful chelating compounds include dihydroxyphenols, like catechol or protocatechuate, or organic acids, such as citric acid. It is typical for the media to also contain other growth factors, such as vitamins or growth promoters, examples of which include biotin, riboflavin, thiamin, folic acid, nicotinic acid, pantothenate and pyridoxin. Growth factors and salts frequently originate from complex media components such as yeast extract, molasses, corn steep liquor and others. The exact composition of the media compounds depends strongly on the immediate experiment and is individually decided for each specific case. Information about media optimization is available in the textbook “Applied Microbiol. Physiology, A Practical Approach (eds. P. M. Rhodes, P. F. Stanbury, IRL Press (1997) pp. 53-73, ISBN 0 19 963577 3). It is also possible to select growth media from commercial suppliers, like standard 1 (Merck) or BHI (grain heart infusion, DIFCO) or others.

[0141] All medium components are sterilized, either by heat (20 minutes at 1.5 bar and 121° C.) or by sterile filtration. The components can either be sterilized together or, if necessary, separately. All media components can be present at the beginning of growth, or they can optionally be added continuously or batchwise.

[0142] Culture conditions are defined separately for each experiment. The temperature should be in a range between 15° C. and 45° C. The temperature can be kept constant or can be altered during the experiment. The pH of the medium should be in the range of 5 to 8.5, preferably around 7.0, and can be maintained by the addition of buffers to the media. An exemplary buffer for this purpose is a potassium phosphate buffer. Synthetic buffers such as MOPS, HEPES, ACES and others can alternatively or simultaneously be used. It is also possible to maintain a constant culture pH through the addition of NaOH or NH₄OH during growth. If complex medium components such as yeast extract are utilized, the necessity for additional buffers may be reduced, due to the fact that many complex compounds have high buffer capacities. If a fermentor is utilized for culturing the micro-organisms, the pH can also be controlled using gaseous ammonia.

[0143] The incubation time is usually in a range from several hours to several days. This time is selected in order to permit the maximal amount of product to accumulate in the broth. The disclosed growth experiments can be carried out in a variety of vessels, such as microtiter plates, glass tubes, glass flasks or glass or metal fermentors of different sizes. For screening a large number of clones, the microorganisms should be cultured in microtiter plates, glass tubes or shake flasks, either with or without baffles. Preferably 100 ml shake flasks are used, filled with 10% (by volume) of the required growth medium. The flasks should be shaken on a rotary shaker (amplitude 25 mm) using a speed-range of 100-300 rpm. Evaporation losses can be diminished by the maintenance of a humid atmosphere; alternatively, a mathematical correction for evaporation losses should be performed.

[0144] If genetically modified clones are tested, an unmodified control clone or a control clone containing the basic plasmid without any insert should also be tested. The medium is inoculated to an OD₆₀₀ of 0.5-1.5 using cells grown on agar plates, such as CM plates (10 g/l glucose, 2,5 g/l NaCl, 2 g/l urea, 10 g/l polypeptone, 5 g/l yeast extract, 5 g/l meat extract, 22 g/l NaCl, 2 g/l urea, 10 g/l polypeptone, 5 g/l yeast extract, 5 g/l meat extract, 22 g/l agar, pH 6.8 with 2M NaOH) that had been incubated at 30° C. Inoculation of the media is accomplished by either introduction of a saline suspension of C. glutamicum cells from CM plates or addition of a liquid preculture of this bacterium.

### Example 8

### In vitro Analysis of the Function of Mutant Proteins

[0145] The determination of activities and kinetic parameters of enzymes is well established in the art. Experiments to determine the activity of any given altered enzyme must be tailored to the specific activity of the wild-type enzyme, which is well within the ability of one of ordinary skill in the art. Overviews about enzymes in general, as well as specific details concerning structure, kinetics, principles, methods, applications and examples for the determination of many enzyme activities may be found, for example, in the following references: Dixon, M., and Webb, E. C., (1979) Enzymes. Longmans: London; Fersht, (1985) Enzyme Structure and Mechanism. Freeman: New York; Walsh, (1979) Enzymatic Reaction Mechanisms. Freeman: San Francisco; Price, N. C., Stevens, L. (1982) Fundamentals of Enzymology. Oxford Univ. Press: Oxford; Boyer, P. D., ed. (1983) The Enzymes, 3^{rd}. Academic Press: New York; Bisswanger, H., (1994) Enzymkinetik, 2^{nd} ed. VCH: Weinheim (ISBN 3527300325); Bergmeyer, H. U., Bergmeyer, J., Graβ1, M., eds. (1983-1986) Methods of Enzymatic Analysis, 3^{rd} ed., vol. I-XII, Verlag Chemie: Weinheim; and Ullmann's Encyclopedia of Industrial Chemistry (1987) vol. A9, “Enzymes”. VCH: Weinheim, p. 352-363.

[0146] The activity of proteins which bind to DNA can be measured by several well-established methods, such as DNA band-shift assays (also called gel retardation assays). The effect of such proteins on the expression of other molecules can be measured using reporter gene assays (such as that described in Kolmar, H. et al. (1995) EMBO J. 14: 3895-3904 and references cited therein). Reporter gene test systems are well known and established for applications in both pro- and eukaryotic cells, using enzymes such as beta-galactosidase, green fluorescent protein, and several others.

[0147] The determination of activity of membrane-transport proteins can be performed according to techniques such as those described in Gennis, R. B. (1989) “Pores, Channels and Transporters”, in Biomembranes, Molecular Structure and Function, Springer: Heidelberg, p. 85-137; 199-234; and 270-322.

### Example 9

### Analysis of Impact of Mutant Protein on the Production of the Desired Product

[0148] The effect of the genetic modification in C. glutamicum on production of a desired compound (such as an amino acid) can be assessed by growing the modified microorganism under suitable conditions (such as those described above) and analyzing the medium and/or the cellular component for increased production of the desired product (i.e., an amino acid). Such analysis techniques are well known to one of ordinary skill in the art, and include spectroscopy, thin layer chromatography, staining methods of various kinds, enzymatic and microbiological methods, and analytical chromatography such as high performance liquid chromatography (see, for example, Ullman, Encyclopedia of Industrial Chemistry, vol. A2, p. 89-90 and p. 443-613, VCH: Weinheim (1985); Fallon, A. et al., (1987) “Applications of HPLC in Biochemistry” in: Laboratory Techniques in Biochemistry and Molecular Biology, vol. 17; Rehm et al. (1993) Biotechnology, vol. 3, Chapter III: “Product recovery and purification”, page 469-714, VCH: Weinheim; Belter, P. A. et al. (1988) Bioseparations: downstream processing for biotechnology, John Wiley and Sons; Kennedy, J. F. and Cabral, J. M. S. (1992) Recovery processes for biological materials, John Wiley and Sons; Shaeiwitz, J. A. and Henry, J. D. (1988) Biochemical separations, in: Ulmann's Encyclopedia of Industrial Chemistry, vol. B3, Chapter 11, page 1-27, VCH: Weinheim; and Dechow, F. J. (1989) Separation and purification techniques in biotechnology, Noyes Publications.)

[0149] In addition to the measurement of the final product of fermentation, it is also possible to analyze other components of the metabolic pathways utilized for the production of the desired compound, such as intermediates and side-products, to determine the overall yield, production, and/or efficiency of production of the compound. Analysis methods include measurements of nutrient levels in the medium (e.g., sugars, hydrocarbons, nitrogen sources, phosphate, and other ions), measurements of biomass composition and growth, analysis of the production of common metabolites of biosynthetic pathways, and measurement of gasses produced during fermentation. Standard methods for these measurements are outlined in Applied Microbial Physiology, A Practical Approach, P. M. Rhodes and P. F. Stanbury, eds., IRL Press, p. 103-129; 131-163; and 165-192 (ISBN: 0199635773) and references cited therein.

### Example 10

### Purification of the Desired Product from C. glutamicum Culture

[0150] Recovery of the desired product from the C. glutamicum cells or supernatant of the above-described culture can be performed by various methods well known in the art. If the desired product is not secreted from the cells, the cells can be harvested from the culture by low-speed centrifugation, the cells can be lysed by standard techniques, such as mechanical force or sonication. The cellular debris is removed by centrifugation, and the supernatant fraction containing the soluble proteins is retained for further purification of the desired compound. If the product is secreted from the C. glutamicum cells, then the cells are removed from the culture by low-speed centrifugation, and the supernate fraction is retained for further purification.

[0151] The supernatant fraction from either purification method is subjected to chromatography with a suitable resin, in which the desired molecule is either retained on a chromatography resin while many of the impurities in the sample are not, or where the impurities are retained by the resin while the sample is not. Such chromatography steps may be repeated as necessary, using the same or different chromatography resins. One of ordinary skill in the art would be well-versed in the selection of appropriate chromatography resins and in their most efficacious application for a particular molecule to be purified. The purified product may be concentrated by filtration or ultrafiltration, and stored at a temperature at which the stability of the product is maximized.

[0152] There are a wide array of purification methods known to the art and the preceding method of purification is not meant to be limiting. Such purification techniques are described, for example, in Bailey, J. E. & Ollis, D. F. Biochemical Engineering Fundamentals, McGraw-Hill: New York (1986).

[0153] The identity and purity of the isolated compounds may be assessed by techniques standard in the art. These include high-performance liquid chromatography (HPLC), spectroscopic methods, staining methods, thin layer chromatography, NIRS, enzymatic assay, or microbiologically. Such analysis methods are reviewed in: Patek et al. (1994) Appl. Environ. Microbiol. 60: 133-140; Malakhova et al. (1996) Biotekhnologiya 11: 27-32; and Schmidt et al. (1998) Bioprocess Engineer. 19: 67-70. Ulmann's Encyclopedia of Industrial Chemistry, (1996) vol. A27, VCH: Weinheim, p. 89-90, p. 521-540, p. 540-547, p. 559-566, 575-581 and p. 581-587; Michal, G. (1999) Biochemical Pathways: An Atlas of Biochemistry and Molecular Biology, John Wiley and Sons; Fallon, A. et al. (1987) Applications of HPLC in Biochemistry in: Laboratory Techniques in Biochemistry and Molecular Biology, vol. 17.

### Example 11

### Cloning of a Corynebacterium glutamicum Gene Involved in Lincomycin Resistance Using a Reporter Gene Approach

A. Identification of the Gene Encoding the LMRB Protein

[0154] Plasmid pSL130 was constructed by ligation of the aceB promoter region (paceB) of C. glutamicum (Kim, H. J. et al. (1997) J. Microbiol. Biotechnol. 7: 287-292) into the polylinker of the lac operon fusion vector pRS415, which lacks a promoter (Simon, R. W. et al. (1987) Gene 53: 85-96). Plasmid pSL145 was constructed by ligating the resulting paceB-lac region into the E. coli cloning vector pACYC184. E. coli DH5αF′ was transformed with pSL145 and the resulting strain was used as a host for screening of a genomic C. glutamicum library (in pSL109).

[0155] Transformants were screened by growth on agar medium containing 5-bromo-4-chloro-3-indolyl-beta-D-glalactopyranoside (X-Gal). A white colony, containing DNA influencing lacZ expression, was selected for further analysis. This clone was found to contain a 4 kB fragment from the gene library. Subdlones were constructed in pSL109 and a subclone which retained the white phenotype on X-Gal plates was identified. This subclone was found to contain a 2.6 kB BamHI-XhoI fragment (plasmid pSL149-5). The fragment was sequenced and identified as a membrane protein-encoding gene (LMRB gene).

[0156] The 1442 nucleotides of the coding sequence of the LMRB gene encode a polypeptide of 481 amino acid residues with a high percentage of hydrophobic amino acids. A Genbank search determined that the LMRB protein is 40% identical to the protein product of the ImrB gene from Bacillus subtilis (Genbank Accession AL009126, TREMBL Accession P94422), as determined using a CLUSTAL W analysis (using standard parameters).

[0157] The LMRN protein contains a sequence pattern: 158-A-P-A-L-G-P-T-L-S-G-167 (SEQ ID NO:301), which resembles the known multi-drug-resistance-protein consensus motif G-X-X-X-G-P-X-X-G-G (SEQ ID NO:302) (Paulsen, I. T., and Skurray, R. A. (1993) Gene 124: 1-11). Therefore, the LMRB protein was classified as a drug resistance protein.

B. In vivo Analysis of lmrB Function

[0158] The lmrB gene was overexpressed in C. glutamicum ASO19E12 (Kim, H. J. et al. (1997) J. Microbiol. Biotechnol. 7: 287-292) using the plasmid pSL149-5, described above.

[0159] Disruption of the LMRB gene was accomplished by use of the vector pSL18-lmrB. This vector was constructed as follows: an internal fragment of the LMRB gene was amplified by PCR under standard conditions using primers 5′-CTCCAGGATTGCTCCGAAGG-3′ (SEQ ID NO:303) and 5′-CACAGTGGTTGACCACTGGC-3′ (SEQ ID NO:304). The resulting PCR product was treated with T7 DNA polymerase and T7 polynucleotide kinase, and was cloned into the SmaI site of plasmid pSL18 (Kim, Y. H. and H.-S. Lee (1996) J. Microbiol. Biotechnol. 6: 315-320). The disruption of the LMRB gene in C. glutamicum ASO19E12 was performed by conjugation, as previously described (Schwarzer and Puhler (1991) Bio/Technology 9:84-87).

[0160] C. glutamicum cells transformed with pSL149-5 displayed similar resistances as untransformed cells against erythromycin, penicillin G, tetracycline, chloramphenicol, spectinomycin, nalidixic acid, gentamycin, streptomycin, ethidium bromide, carbonyl cyanide m-chlorophenylhydrazone (CCCP), and sodium dodecyl sulfate. Significant differences were observed, however, in the resistance of transformed and untransformed cells to lincomycin.

[0161] LMRB-overexpressing C. glutamicum cells were found to be able to grow in the presence of 20 μg/ml lincomycin. In contrast, cells which do not overexpress LMRB (or cells carrying a LMRB disruption) were not able to grow on agar media containing 5 μg/ml lincomycin. This effect was clearly visible in liquid culture. LMRB overexpression led to a 9-fold increased resistance (compared to wild-type) against lincomycin and LMRB disruption resulted in a decreased resistance (28% of wild-type) to this antibiotic.

### Example 12

### Analysis of the Gene Sequences of the Invention

[0162] The comparison of sequences and determination of percent homology between two sequences are art-known techniques, and can be accomplished using a mathematical algorithm, such as the algorithm of Karlin and Altschul (1990) Proc. Natl. Acad. Sci. USA 87:2264-68, modified as in Karlin and Altschul (1993) Proc. Natl. Acad. Sci. USA 90:5873-77. Such an algorithm is incorporated into the NBLAST and XBLAST programs (version 2.0) of Altschul, et al. (1990) J. Mol. Biol. 215:403-10. BLAST nucleotide searches can be performed with the NBLAST program, score=100, wordlength=12 to obtain nucleotide sequences homologous to SRT nucleic acid molecules of the invention. BLAST protein searches can be performed with the XBLAST program, score=50, wordlength=3 to obtain amino acid sequences homologous to SRT protein molecules of the invention. To obtain gapped alignments for comparison purposes, Gapped BLAST can be utilized as described in Altschul et al., (1997) Nucleic Acids Res. 25(17):3389-3402. When utilizing BLAST and Gapped BLAST programs, one of ordinary skill in the art will know how to optimize the parameters of the program (e.g., XBLAST and NBLAST) for the specific sequence being analyzed.

[0163] Another example of a mathematical algorithm utilized for the comparison of sequences is the algorithm of Meyers and Miller ((1988) Comput. Appl. Biosci. 4: 11-17). Such an algorithm is incorporated into the ALIGN program (version 2.0) which is part of the GCG sequence alignment software package. When utilizing the ALIGN program for comparing amino acid sequences, a PAM120 weight residue table, a gap length penalty of 12, and a gap penalty of 4 can be used. Additional algorithms for sequence analysis are known in the art, and include ADVANCE and ADAM. described in Torelli and Robotti (1994) Comput. Appl. Biosci. 10:3-5; and FASTA, described in Pearson and Lipman (1988) P.N.A.S. 85:2444-8.

[0164] The percent homology between two amino acid sequences can also be accomplished using the GAP program in the GCG software package (available at http://www.gcg.com), using either a Blosum 62 matrix or a PAM250 matrix, and a gap weight of 12, 10, 8, 6, or 4 and a length weight of 2, 3, or 4. The percent homology between two nucleic acid sequences can be accomplished using the GAP program in the GCG software package, using standard parameters, such as a gap weight of 50 and a length weight of 3.

[0165] A comparative analysis of the gene sequences of the invention with those present in Genbank has been performed using techniques known in the art (see, e.g., Bexevanis and Ouellette, eds. (1998) Bioinformatics: A Practical Guide to the Analysis of Genes and Proteins. John Wiley and Sons: New York). The gene sequences of the invention were compared to genes present in Genbank in a three-step process. In a first step, a BLASTN analysis (e.g., a local alignment analysis) was performed for each of the sequences of the invention against the nucleotide sequences present in Genbank, and the top 500 hits were retained for further analysis. A subsequent FASTA search (e.g., a combined local and global alignment analysis, in which limited regions of the sequences are aligned) was performed on these 500 hits. Each gene sequence of the invention was subsequently globally aligned to each of the top three FASTA hits, using the GAP program in the GCG software package (using standard parameters). In order to obtain correct results, the length of the sequences extracted from Genbank were adjusted to the length of the query sequences by methods well-known in the art. The results of this analysis are set forth in Table 4. The resulting data is identical to that which would have been obtained had a GAP (global) analysis alone been performed on each of the genes of the invention in comparison with each of the references in Genbank, but required significantly reduced computational time as compared to such a database-wide GAP (global) analysis. Sequences of the invention for which no alignments above the cutoff values were obtained are indicated on Table 4 by the absence of alignment information. It will further be understood by one of ordinary skill in the art that the GAP alignment homology percentages set forth in Table 4 under the heading “% homology (GAP)” are listed in the European numerical format, wherein a ‘,’ represents a decimal point. For example, a value of “40,345” in this column represents “40.345%”.

### Example 13

### Construction and Operation of DNA Microarrays

[0166] The sequences of the invention may additionally be used in the construction and application of DNA microarrays (the design, methodology, and uses of DNA arrays are well known in the art, and are described, for example, in Schena, M. et al. (1995) Science 270: 467-470; Wodicka, L. et al. (1997) Nature Biotechnology 15: 1359-1367; DeSaizieu, A. et al. (1998) Nature Biotechnology 16: 45-48; and DeRisi, J. L. et al. (1997) Science 278: 680-686).

[0167] DNA microarrays are solid or flexible supports consisting of nitrocellulose, nylon, glass, silicone, or other materials. Nucleic acid molecules may be attached to the surface in an ordered manner. After appropriate labeling, other nucleic acids or nucleic acid mixtures can be hybridized to the immobilized nucleic acid molecules, and the label may be used to monitor and measure the individual signal intensities of the hybridized molecules at defined regions. This methodology allows the simultaneous quantification of the relative or absolute amount of all or selected nucleic acids in the applied nucleic acid sample or mixture. DNA microarrays, therefore, permit an analysis of the expression of multiple (as many as 6800 or more) nucleic acids in parallel (see, e.g., Schena, M. (1996) BioEssays 18(5): 427-431).

[0168] The sequences of the invention may be used to design oligonucleotide primers which are able to amplify defined regions of one or more C. glutamicum genes by a nucleic acid amplification reaction such as the polymerase chain reaction. The choice and design of the 5′ or 3′ oligonucleotide primers or of appropriate linkers allows the covalent attachment of the resulting PCR products to the surface of a support medium described above (and also described, for example, Schena, M. et al. (1995) Science 270: 467-470).

[0169] Nucleic acid microarrays may also be constructed by in situ oligonucleotide synthesis as described by Wodicka, L. et al. (1997) Nature Biotechnology 15: 1359-1367. By photolithographic methods, precisely defined regions of the matrix are exposed to light. Protective groups which are photolabile are thereby activated and undergo nucleotide addition, whereas regions that are masked from light do not undergo any modification. Subsequent cycles of protection and light activation permit the synthesis of different oligonucleotides at defined positions. Small, defined regions of the genes of the invention may be synthesized on microarrays by solid phase oligonucleotide synthesis.

[0170] The nucleic acid molecules of the invention present in a sample or mixture of nucleotides may be hybridized to the microarrays. These nucleic acid molecules can be labeled according to standard methods. In brief, nucleic acid molecules (e.g., mRNA molecules or DNA molecules) are labeled by the incorporation of isotopically or fluorescently labeled nucleotides, e.g., during reverse transcription or DNA synthesis. Hybridization of labeled nucleic acids to microarrays is described (e.g., in Schena, M. et al. (1995) supra; Wodicka, L. et al. (1997), supra; and DeSaizieu A. et al. (1998), supra). The detection and quantification of the hybridized molecule are tailored to the specific incorporated label. Radioactive labels can be detected, for example, as described in Schena, M. et al. (1995) supra) and fluorescent labels may be detected, for example, by the method of Shalon et al. (1996) Genome Research 6: 639-645).

[0171] The application of the sequences of the invention to DNA microarray technology, as described above, permits comparative analyses of different strains of C. glutamicum or other Corynebacteria. For example, studies of inter-strain variations based on individual transcript profiles and the identification of genes that are important for specific and/or desired strain properties such as pathogenicity, productivity and stress tolerance are facilitated by nucleic acid array methodologies. Also, comparisons of the profile of expression of genes of the invention during the course of a fermentation reaction are possible using nucleic acid array technology.

### Example 14

### Analysis of the Dynamics of Cellular Protein Populations (Proteomics)

[0172] The genes, compositions, and methods of the invention may be applied to study the interactions and dynamics of populations of proteins, termed ‘proteomics’. Protein populations of interest include, but are not limited to, the total protein population of C. glutamicum (e.g., in comparison with the protein populations of other organisms), those proteins which are active under specific environmental or metabolic conditions (e.g., during fermentation, at high or low temperature, or at high or low pH), or those proteins which are active during specific phases of growth and development.

[0173] Protein populations can be analyzed by various well-known techniques, such as gel electrophoresis. Cellular proteins may be obtained, for example, by lysis or extraction, and may be separated from one another using a variety of electrophoretic techniques. Sodium dodecyl sulfate polyacrylamide gel electrophoresis (SDS-PAGE) separates proteins largely on the basis of their molecular weight. Isoelectric focusing polyacrylamide gel electrophoresis (IEF-PAGE) separates proteins by their isoelectric point (which reflects not only the amino acid sequence but also posttranslational modifications of the protein). Another, more preferred method of protein analysis is the consecutive combination of both IEF-PAGE and SDS-PAGE, known as 2-D-gel electrophoresis (described, for example, in Hermann et al. (1998) Electrophoresis 19: 3217-3221; Fountoulakis et al. (1998) Electrophoresis 19: 1193-1202; Langen et al. (1997) Electrophoresis 18: 1184-1192; Antelmann et al. (1997) Electrophoresis 18: 1451-1463). Other separation techniques may also be utilized for protein separation, such as capillary gel electrophoresis; such techniques are well known in the art.

[0174] Proteins separated by these methodologies can be visualized by standard techniques, such as by staining or labeling. Suitable stains are known in the art, and include Coomassie Brilliant Blue, silver stain, or fluorescent dyes such as Sypro Ruby (Molecular Probes). The inclusion of radioactively labeled amino acids or other protein precursors (e.g., ³⁵S-methionine, ³⁵S-cysteine, ¹⁴C-labelled amino acids, 15N-amino acids, ¹⁵NO₃ or ¹⁵NH₄⁺ or ¹³C-labelled amino acids) in the medium of C. glutamicum permits the labeling of proteins from these cells prior to their separation. Similarly, fluorescent labels may be employed. These labeled proteins can be extracted, isolated and separated according to the previously described techniques.

[0175] Proteins visualized by these techniques can be further analyzed by measuring the amount of dye or label used. The amount of a given protein can be determined quantitatively using, for example, optical methods and can be compared to the amount of other proteins in the same gel or in other gels. Comparisons of proteins on gels can be made, for example, by optical comparison, by spectroscopy, by image scanning and analysis of gels, or through the use of photographic films and screens. Such techniques are well-known in the art.

[0176] To determine the identity of any given protein, direct sequencing or other standard techniques may be employed. For example, N- and/or C-terminal amino acid sequencing (such as Edman degradation) may be used, as may mass spectrometry (in particular MALDI or ESI techniques (see, e.g., Langen et al. (1997) Electrophoresis 18: 1184-1192)). The protein sequences provided herein can be used for the identification of C. glutamicum proteins by these techniques.

[0177] The information obtained by these methods can be used to compare patterns of protein presence, activity, or modification between different samples from various biological conditions (e.g., different organisms, time points of fermentation, media conditions, or different biotopes, among others). Data obtained from such experiments alone, or in combination with other techniques, can be used for various applications, such as to compare the behavior of various organisms in a given (e.g., metabolic) situation, to increase the productivity of strains which produce fine chemicals or to increase the efficiency of the production of fine chemicals.

Equivalents

[0178] Those of ordinary skill in the art will recognize, or will be able to ascertain using no more than routine experimentation, many equivalents to the specific embodiments of the invention described herein. Such equivalents are intended to be encompassed by the following claims.

TABLE 1
Genes Included in the Application

| Nucleic | Amino | | | | | |
|---|---|---|---|---|---|---|
| Acid | Acid | | | | | |
| SEQ | SEQ | Identification | | NT | NT | |
| ID NO | ID NO | Code | Contig. | Start | Stop | Function |
| 1 | 2 | RXA01524 | GR00424 | 29041 | 30483 | Lincomycine RESISTANCE PROTEIN |
| 3 | 4 | RXA00497 | GR00124 | 52 | 348 | 10 KD CHAPERONIN |
| 5 | 6 | RXN00493 | VV0086 | 14389 | 16002 | 60 KD CHAPERONIN |
| 7 | 8 | F RXA00498 | GR00124 | 363 | 1601 | 60 KD CHAPERONIN |
| 9 | 10 | RXA01217 | GR00353 | 802 | 203 | GENERAL STRESS PROTEIN CTC |
| 11 | 12 | RXA00605 | GR00159 | 7412 | 5865 | CATALASE (EC 1.11.1.6) |
| 13 | 14 | RXA00404 | GR00089 | 2909 | 594 | CARBON STARVATION PROTEIN A |
| 15 | 16 | RXN03119 | VV0098 | 86877 | 87008 | SUPEROXIDE DISMUTASE [MN] (EC 1.15.1.1) |
| 17 | 18 | RXN03120 | VV0098 | 87351 | 87476 | SUPEROXIDE DISMUTASE [MN] (EC 1.15.1.1) |
| 19 | 20 | RXN00575 | VV0323 | 14716 | 15252 | PHOSPHINOTHRICIN-RESISTANCE PROTEIN |
| 21 | 22 | F RXA00575 | GR00156 | 2130 | 1648 | PHOSPHINOTHRICIN-RESISTANCE PROTEIN |

Chaperones

| | | | | | | |
|---|---|---|---|---|---|---|
| 23 | 24 | RXN01345 | VV0123 | 4883 | 3432 | Moleculares chaperon (HSP70/DnaK family) |
| 25 | 26 | F RXA01345 | GR00391 | 1172 | 6 | Molecular chaperones (HSP70/DnaK family) |
| 27 | 28 | RXA02541 | GR00726 | 13657 | 12473 | DNAJ PROTEIN |
| 29 | 30 | RXA02542 | GR00726 | 14518 | 13865 | GRPE PROTEIN |
| 31 | 32 | RXN02543 | VV0057 | 22031 | 20178 | DNAK PROTEIN |
| 33 | 34 | F RXA02543 | GR00726 | 16375 | 14522 | DNAK PROTEIN |
| 35 | 36 | RXN02280 | VV0152 | 1849 | 26 | TRAP1 |
| 37 | 38 | F RXA02282 | GR00659 | 1145 | 1480 | Molecular chaperone, HSP90 family |
| 39 | 40 | RXA00886 | GR00242 | 12396 | 13541 | DNAJ PROTEIN |
| 41 | 42 | RXS00568 | VV0251 | 2928 | 1582 | TRIGGER FACTOR |
| 43 | 44 | RXN03038 | VV0017 | 42941 | 43666 | PS1 PROTEIN VORLAUFER |
| 45 | 46 | RXN03039 | VV0018 | 2 | 631 | PS1 PROTEIN VORLAUFER |
| 47 | 48 | RXN03040 | VV0018 | 761 | 1069 | PS1 PROTEIN VORLAUFER |
| 49 | 50 | RXN03051 | VV0022 | 2832 | 3566 | PS1 PROTEIN VORLAUFER |
| 51 | 52 | RXN03054 | VV0026 | 1906 | 3486 | PS1 PROTEIN VORLAUFER |
| 53 | 54 | RXN02949 | VV0025 | 31243 | 31575 | PREPROTEIN TRANSLOKASE SECE UNTEREINHEIT |
| 55 | 56 | RXN02462 | VV0124 | 11932 | 13749 | PREPROTEIN TRANSLOKASE SECA UNTEREINHEIT |
| 57 | 58 | RXN01559 | VV0171 | 7795 | 5954 | PROTEIN-EXPORT MEMBRANE PROTEIN SECD |
| 59 | 60 | RXN00046 | VV0119 | 5363 | 6058 | Signal Erkennung particle GTPase |
| 61 | 62 | RXN01863 | VV0206 | 1172 | 24 | /O/C Thioredoxin-ahnliche oxidoreductase |
| 63 | 64 | RXN00833 | VV0180 | 8039 | 8533 | THIOL PEROXIDASE (EC 1.11.1.—) |
| 65 | 66 | RXN01676 | VV0179 | 12059 | 11304 | THIOL: DISULFIDE AUSTAUSCH PROTEIN DSBD |
| 67 | 68 | RXN00380 | VV0223 | 836 | 216 | THIOL: DISULFIDE AUSTAUSCH PROTEIN TLPA |
| 69 | 70 | RXN00937 | VV0079 | 42335 | 42706 | THIOREDOXIN |
| 71 | 72 | RXN02325 | VV0047 | 5527 | 6393 | THIOREDOXIN |
| 73 | 74 | RXN01837 | VV0320 | 7103 | 7879 | PEPTIDYL-PROLYL CIS-TRANS ISOMERASE (EC 5.2.1.8) |
| 75 | 76 | RXN01926 | VV0284 | 1 | 741 | PEPTID KETTE RELEASE FACTOR 3 |
| 77 | 78 | RXN02002 | VV0111 | 141 | 518 | PEPTID KETTE RELEASE FACTOR 3 |
| 79 | 80 | RXN02736 | VV0074 | 13600 | 14556 | PUTATIVES OXPPCYCLE PROTEIN OPCA |
| 81 | 82 | RXS03217 | | | | SMALL COLD-SHOCK PROTEIN |
| 83 | 84 | F RXA01917 | GR00549 | 3465 | 3665 | SMALL COLD-SHOCK PROTEIN |

Proteins involved in stress responses

| | | | | | | |
|---|---|---|---|---|---|---|
| 85 | 86 | RXA02184 | GR00641 | 19628 | 19248 | COLD SHOCK-LIKE PROTEIN CSPC |
| 87 | 88 | RXA00810 | GR00218 | 792 | 992 | SMALL COLD-SHOCK PROTEIN |
| 89 | 90 | RXA01674 | GR00467 | 1878 | 2771 | PROBABLE HYDROGEN PEROXIDE-INDUCIBLE GENES ACTIVATOR |
| 91 | 92 | RXA02431 | GR00708 | 2 | 1192 | damage-inducible protein P |
| 93 | 94 | RXA02446 | GR00709 | 11640 | 11206 | OSMOTICALLY INDUCIBLE PROTEIN C |
| 95 | 96 | RXA02861 | GR10006 | 551 | 1633 | probable metallothionein u0308aa —Mycobacterium leprae |
| 97 | 98 | RXA00981 | GR00276 | 3388 | 4017 | GTP PYROPHOSPHOKINASE (EC 2.7.6.5) |
| 99 | 100 | RXN00786 | VV0321 | 1680 | 706 | LYTB PROTEIN |
| 101 | 102 | RXS01027 | VV0143 | 5761 | 6768 | DIADENOSINE 5′,5′′′-P1,P4-TETRAPHOSPHATE HYDROLASE (EC 3.6.1.17) |
| 103 | 104 | RXS01528 | VV0050 | 17276 | 16749 | DIADENOSINE 5′,5′′′-P1,P4-TETRAPHOSPHATE HYDROLASE (EC 3.6.1.17) |
| 105 | 106 | RXS01716 | VV0319 | 3259 | 2774 | EXOPOLYPHOSPHATASE (EC 3.6.1.11) |
| 107 | 108 | RXS01835 | VV0143 | 10575 | 10045 | GUANOSINE-3′,5′-BIS(DIPHOSPHATE) 3′-PYROPHOSPHOHYDROLASE |
| | | | | | | (EC 3.1.7.2) |
| 109 | 110 | RXS02497 | VV0007 | 15609 | 16535 | EXOPOLYPHOSPHATASE (EC 3.6.1.11) |
| 111 | 112 | RXS02972 | VV0319 | 2763 | 2353 | EXOPOLYPHOSPHATASE (EC 3.6.1.11) |

Resistance and tolerance

| | | | | | | |
|---|---|---|---|---|---|---|
| 113 | 114 | RXA02159 | GR00640 | 6231 | 6743 | ARGININE HYDROXIMATE RESISTANCE PROTEIN |
| 115 | 116 | RXA02201 | GR00646 | 5837 | 6199 | ARSENATE REDUCTASE |
| 117 | 118 | RXA00599 | GR00159 | 1843 | 1457 | ARSENICAL-RESISTANCE PROTEIN ACR3 |
| 119 | 120 | RXA00600 | GR00159 | 2940 | 1843 | ARSENICAL-RESISTANCE PROTEIN ACR3 |
| 121 | 122 | RXA02200 | GR00646 | 4651 | 5760 | ARSENICAL-RESISTANCE PROTEIN ACR3 |
| 123 | 124 | RXA02202 | GR00646 | 6278 | 6916 | ARSENICAL-RESISTANCE PROTEIN ACR3 |
| 125 | 126 | RXA02205 | GR00646 | 9871 | 8993 | BACITRACIN RESISTANCE PROTEIN (PUTATIVE |
| | | | | | | UNDECAPRENOL KINASE) (EC 2.7.1.66) |
| 127 | 128 | RXA00900 | GR00245 | 4052 | 3201 | BICYCLOMYCIN RESISTANCE PROTEIN |
| 129 | 130 | RXN00901 | VV0140 | 8581 | 8168 | BICYCLOMYCIN RESISTANCE PROTEIN |
| 131 | 132 | F RXA00901 | GR00245 | 4357 | 3980 | BICYCLOMYCIN RESISTANCE PROTEIN |
| 133 | 134 | RXA00289 | GR00046 | 3263 | 4438 | CHLORAMPHENICOL RESISTANCE PROTEIN |
| 135 | 136 | RXN01984 | VV0056 | 1515 | 1811 | CHLORAMPHENICOL RESISTANCE PROTEIN |
| 137 | 138 | F RXA01984 | GR00574 | 282 | 4 | CHLORAMPHENICOL RESISTANCE PROTEIN |
| 139 | 140 | RXA00109 | GR00015 | 1176 | 565 | COPPER RESISTANCE PROTEIN C PRECURSOR |
| 141 | 142 | RXA00109 | GR00015 | 1176 | 565 | COPPER RESISTANCE PROTEIN C PRECURSOR |
| 143 | 144 | RXA00996 | GR00283 | 1763 | 1023 | DAUNORUBICIN RESISTANCE ATP-BINDING PROTEIN DRRA |
| 145 | 146 | RXN00829 | VV0180 | 7950 | 5611 | DAUNORUBICIN RESISTANCE PROTEIN |
| 147 | 148 | F RXA00829 | GR00224 | 2 | 256 | DAUNORUBICIN RESISTANCE PROTEIN |
| 149 | 150 | F RXA00834 | GR00225 | 463 | 2025 | DAUNORUBICIN RESISTANCE PROTEIN |
| 151 | 152 | RXA00995 | GR00283 | 1023 | 283 | DAUNORUBICIN RESISTANCE TRANSMEMBRANE PROTEIN |
| 153 | 154 | RXN00803 | VV0009 | 53858 | 52629 | METHYLENOMYCIN A RESISTANCE PROTEIN |
| 155 | 156 | F RXA00803 | GR00214 | 4560 | 5162 | METHYLENOMYCIN A RESISTANCE PROTEIN |
| 157 | 158 | RXA01407 | GR00410 | 3918 | 3028 | METHYLENOMYCIN A RESISTANCE PROTEIN |
| 159 | 160 | RXA01408 | GR00410 | 4384 | 4184 | METHYLENOMYCIN A RESISTANCE PROTEIN |
| 161 | 162 | RXN01922 | VV0020 | 2031 | 3182 | METHYLENOMYCIN A RESISTANCE PROTEIN |
| 163 | 164 | F RXA01922 | GR00552 | 3 | 1109 | METHYLENOMYCIN A RESISTANCE PROTEIN |
| 165 | 166 | RXA02060 | GR00626 | 1 | 339 | MYCINAMICIN-RESISTANCE PROTEIN MYRA |
| 167 | 168 | RXN01936 | VV0127 | 40116 | 41387 | MACROLIDE-EFFLUX PROTEIN |
| 169 | 170 | F RXA01936 | GR00555 | 9796 | 8975 | NICKEL RESISTANCE PROTEIN |
| 171 | 172 | F RXA01937 | GR00555 | 10246 | 9821 | NICKEL RESISTANCE PROTEIN |
| 173 | 174 | RXN01010 | VV0209 | 3776 | 4894 | QUINOLONE RESISTANCE NORA PROTEIN |
| 175 | 176 | F RXA01010 | GR00288 | 774 | 4 | QUINOLONE RESISTANCE NORA PROTEIN |
| 177 | 178 | RXN03142 | VV0136 | 5754 | 4612 | QUINOLONE RESISTANCE NORA PROTEIN |
| 179 | 180 | F RXA01150 | GR00323 | 3807 | 2917 | QUINOLONE RESISTANCE NORA PROTEIN |
| 181 | 182 | RXN02964 | VV0102 | 7931 | 6714 | QUINOLONE RESISTANCE NORA PROTEIN |
| 183 | 184 | F RXA02116 | GR00636 | 911 | 6 | QUINOLONE RESISTANCE NORA PROTEIN |
| 185 | 186 | RXA00858 | GR00233 | 1680 | 2147 | TELLURIUM RESISTANCE PROTEIN TERC |
| 187 | 188 | RXA02305 | GR00663 | 2921 | 2070 | DAUNOMYCIN C-14 HYDROXYLASE |
| 189 | 190 | RXA00084 | GR00013 | 2367 | 1543 | VIBRIOBACTIN UTILIZATION PROTEIN VIUB |
| 191 | 192 | RXA00843 | GR00228 | 3236 | 3580 | ARSENATE REDUCTASE |
| 193 | 194 | RXA01052 | GR00296 | 3398 | 3706 | MERCURIC REDUCTASE (EC 1.16.1.1) |
| 195 | 196 | RXA01053 | GR00296 | 3772 | 4191 | MERCURIC REDUCTASE (EC 1.16.1.1) |
| 197 | 198 | RXA01054 | GR00296 | 4229 | 4717 | MERCURIC REDUCTASE (EC 1.16.1.1) |
| 199 | 200 | RXN03123 | VV0106 | 808 | 1245 | HEAVY METAL TOLERANCE PROTEIN PRECURSOR |
| 201 | 202 | F RXA00993 | GR00282 | 641 | 6 | HEAVY METAL TOLERANCE PROTEIN PRECURSOR |
| 203 | 204 | RXA01051 | GR00296 | 3298 | 2690 | VANZ PROTEIN teicoplanin resistance protein |
| 205 | 206 | RXN01873 | VV0248 | 2054 | 819 | Hypothetical Drug Resistance Protein |
| 207 | 208 | F RXA01873 | GR00535 | 855 | 1946 | Hypothetical Drug Resistance Protein |
| 209 | 210 | RXN00034 | VV0020 | 16933 | 18381 | MULTIDRUG RESISTANCE PROTEIN B |
| 211 | 212 | F RXA02273 | GR00655 | 8058 | 9002 | Hypothetical Drug Resistance Protein |
| 213 | 214 | RXN03075 | VV0042 | 2491 | 3216 | Hypothetical Drug Transporter |
| 215 | 216 | F RXA02907 | GR10044 | 1395 | 2120 | Hypothetical Drug Transporter |
| 217 | 218 | RXA00479 | GR00119 | 16290 | 14101 | Hypothetical Drug Transporter |
| 219 | 220 | RXN03124 | VV0108 | 4 | 963 | Hypothetical Drug Transporter |
| 221 | 222 | F RXA01180 | GR00336 | 4 | 765 | Hypothetical Drug Transporter |
| 223 | 224 | RXA02586 | GR00741 | 10296 | 10027 | Hypothetical Drug Transporter |
| 225 | 226 | RXA02587 | GR00741 | 12343 | 10253 | Hypothetical Drug Transporter |
| 227 | 228 | RXN03042 | VV0018 | 2440 | 1835 | Hypothetical Drug Transporter |
| 229 | 230 | F RXA02893 | GR10035 | 1841 | 1236 | Hypothetical Drug Transporter |
| 231 | 232 | RXA01616 | GR00450 | 1684 | 203 | MULTIDRUG EFFLUX PROTEIN QACB |
| 233 | 234 | RXA01666 | GR00463 | 2307 | 3683 | MULTIDRUG RESISTANCE PROTEIN |
| 235 | 236 | RXA00062 | GR00009 | 13252 | 11855 | MULTIDRUG RESISTANCE PROTEIN B |
| 237 | 238 | RXA00215 | GR00032 | 13834 | 15294 | MULTIDRUG RESISTANCE PROTEIN B |
| 239 | 240 | RXN03064 | VV0038 | 4892 | 6223 | MULTIDRUG RESISTANCE PROTEIN B |
| 241 | 242 | F RXA00565 | GR00151 | 4892 | 5884 | MULTIDRUG RESISTANCE PROTEIN B |
| 243 | 244 | F RXA02878 | GR10016 | 1837 | 1481 | MULTIDRUG RESISTANCE PROTEIN B |
| 245 | 246 | RXA00648 | GR00169 | 2713 | 1304 | MULTIDRUG RESISTANCE PROTEIN B |
| 247 | 248 | RXN01320 | VV0082 | 13146 | 11500 | MULTIDRUG RESISTANCE PROTEIN B |
| 249 | 250 | F RXA01314 | GR00382 | 744 | 4 | MULTIDRUG RESISTANCE PROTEIN B |
| 251 | 252 | F RXA01320 | GR00383 | 1979 | 1200 | MULTIDRUG RESISTANCE PROTEIN B |
| 253 | 254 | RXN02926 | VV0082 | 11497 | 9866 | MULTIDRUG RESISTANCE PROTEIN B |
| 255 | 256 | F RXA01319 | GR00383 | 1197 | 4 | MULTIDRUG RESISTANCE PROTEIN B |
| 257 | 258 | RXA01578 | GR00439 | 1423 | 29 | MULTIDRUG RESISTANCE PROTEIN B |
| 259 | 260 | RXA02087 | GR00629 | 7076 | 5730 | MULTIDRUG RESISTANCE PROTEIN B |
| 261 | 262 | RXA02088 | GR00629 | 8294 | 7080 | MULTIDRUG RESISTANCE PROTEIN B |
| 263 | 264 | RXA00764 | GR00204 | 3284 | 2169 | BMRU PROTEIN Bacillus subtilis bmrU, multidrug efflux transporter |
| 265 | 266 | RXN03125 | VV0108 | 972 | 1142 | Hypothetical Drug Transporter |
| 267 | 268 | RXN01553 | VV0135 | 25201 | 26520 | Hypothetical Drug Permease |
| 269 | 270 | RXN00535 | VV0219 | 5155 | 5871 | Hypothetical Drug Resistance Protein |
| 271 | 272 | RXN00453 | VV0076 | 1173 | 3521 | Hypothetical Drug Transporter |
| 273 | 274 | RXN00932 | VV0171 | 13120 | 13593 | Hypothetical Drug Transporter |
| 275 | 276 | RXN03022 | VV0002 | 65 | 511 | MULTIDRUG RESISTANCE PROTEIN B |
| 277 | 278 | RXN03151 | VV0163 | 489 | 4 | MYCINAMICIN-RESISTANCE PROTEIN MYRA |
| 279 | 280 | RXN02832 | VV0358 | 547 | 5 | LYSOSTAPHIN IMMUNITY FACTOR |
| 281 | 282 | RXN00165 | VV0232 | 3275 | 1860 | MULTIDRUG RESISTANCE-LIKE ATP-BINDING PROTEIN MDL |
| 283 | 284 | RXN01190 | VV0169 | 8992 | 10338 | MULTIDRUG RESISTANCE-LIKE ATP-BINDING PROTEIN MDL |
| 285 | 286 | RXN01102 | VV0059 | 6128 | 4884 | QUINOLONE RESISTANCE NORA PROTEIN |
| 287 | 288 | RXN00788 | VV0321 | 3424 | 3648 | CHLORAMPHENICOL RESISTANCE PROTEIN |
| 289 | 290 | RXN02119 | VV0102 | 11242 | 9602 | A201A-RESISTANCE ATP-BINDING PROTEIN |
| 291 | 292 | RXN01605 | VV0137 | 7124 | 5610 | DAUNORUBICIN RESISTANCE TRANSMEMBRANE PROTEIN |
| 293 | 294 | RXN01091 | VV0326 | 567 | 4 | MAZG PROTEIN |
| 295 | 296 | RXS02979 | VV0149 | 2150 | 2383 | MERCURIC TRANSPORT PROTEIN PERIPLASMIC |
| | | | | | | COMPONENT PRECURSOR |
| 297 | 298 | RXS02987 | VV0234 | 527 | 294 | MERCURIC TRANSPORT PROTEIN PERIPLASMIC |
| | | | | | | COMPONENT PRECURSOR |
| 299 | 300 | RXS03095 | VV0057 | 4056 | 4424 | CADMIUM EFFLUX SYSTEM ACCESSORY PROTEIN HOMOLOG |

[0179] TABLE 2

| GenBank ™ | | | |
|---|---|---|---|
| Accession | Gene | | |
| No. | Name | Gene Function | Reference |
| A09073 | ppg | Phosphoenol pyruvate carboxylase | Bachmann, B. et al. “DNA fragment coding for phosphoenolpyruvat |
| | | | corboxylase, recombinant DNA carrying said fragment, strains carrying the |
| | | | recombinant DNA and method for producing L-aminino acids using said |
| | | | strains,” Patent: EP 0358940-A 3 Mar. 21, 1990 |
| A45579, | | Threonine dehydratase | Moeckel, B. et al. “Production of L-isoleucine by means of recombinant |
| A45581, | | | micro-organisms with deregulated threonine dehydratase,” Patent: WO |
| A45583, | | | 9519442-A 5 Jul. 20, 1995 |
| A45585 | | | |
| A45587 | | | |
| AB003132 | murC; | | Kobayashi, M. et al. “Cloning, sequencing, and characterization of the ftsZ |
| | ftsQ; | | gene from coryneform bacteria,” Biochem. Biophys. Res. Commun., |
| | ftsZ | | 236(2): 383-388 (1997) |
| AB015023 | murC; | | Wachi, M. et al. “A murC gene from Coryneform bacteria,” Appl. Microbiol. |
| | ftsQ | | Biotechnol., 51(2): 223-228 (1999) |
| AB018530 | dtsR | | Kimura, E. et al. “Molecular cloning of a novel gene, dtsR, which rescues the |
| | | | detergent sensitivity of a mutant derived from Brevibacterium |
| | | | lactofermentum,” Biosci. Biotechnol. Biochem., 60(10): 1565-1570 (1996) |
| AB018531 | dtsR1; | | |
| | dtsR2 | | |
| AB020624 | murI | D-glutamate racemase | |
| AB023377 | tkt | transketolase | |
| AB024708 | gltB; | Glutamine 2-oxoglutarate | |
| | gltD | aminotransferase large and small subunits | |
| AB025424 | acn | aconitase | |
| AB027714 | rep | Replication protein | |
| AB027715 | rep; aad | Replication protein; aminoglycoside | |
| | | adenyltransferase | |
| AF005242 | argC | N-acetylglutamate-5-semialdehyde | |
| | | dehydrogenase | |
| AF005635 | glnA | Glutamine synthetase | |
| AF030405 | hisF | cyclase | |
| AF030520 | argG | Argininosuccinate synthetase | |
| AF031518 | argF | Ornithine carbamolytransferase | |
| AF036932 | aroD | 3-dehydroquinate dehydratase | |
| AF038548 | pyc | Pyruvate carboxylase | |
| AF038651 | dciAE; | Dipeptide-binding protein; adenine | Wehmeier, L. et al. “The role of the Corynebacterium glutamicum rel gene in |
| | apt; rel | phosphoribosyltransferase; GTP | (p)ppGpp metabolism,” Microbiology, 144: 1853-1862 (1998) |
| | | pyrophosphokinase | |
| AF041436 | argR | Arginine repressor | |
| AF045998 | impA | Inositol monophosphate phosphatase | |
| AF048764 | argH | Argininosuccinate lyase | |
| AF049897 | argC; | N-acetylglutamylphosphate reductase; | |
| | argJ; | ornithine acetyltransferase; N- | |
| | argB; | acetylglutamate kinase; acetylornithine | |
| | argD; | transminase; ornithine | |
| | argF; | carbamoyltransferase; arginine repressor; | |
| | argR; | argininosuccinate synthase; | |
| | argG; | argininosuccinate lyase | |
| | argH | | |
| AF050109 | inhA | Enoyl-acyl carrier protein reductase | |
| AF050166 | hisG | ATP phosphoribosyltransferase | |
| AF051846 | hisA | Phosphoribosylformimino-5-amino-1- | |
| | | phosphoribosyl-4-imidazolecarboxamide | |
| | | isomerase | |
| AF052652 | metA | Homoserine O-acetyltransferase | Park, S. et al. “Isolation and analysis of metA, a methionine biosynthetic gene |
| | | | encoding homoserine acetyltransferase in Corynebacterium glutamicum,” Mol. |
| | | | Cells., 8(3): 286-294 (1998) |
| AF053071 | aroB | Dehydroquinate synthetase | |
| AF060558 | hisH | Glutamine amidotransferase | |
| AF086704 | hisE | Phosphoribosyl-ATP- | |
| | | pyrophosphohydrolase | |
| AF114233 | aroA | 5-enolpyruvylshikimate 3-phosphate | |
| | | synthase | |
| AF116184 | panD | L-aspartate-alpha-decarboxylase precursor | Dusch, N. et al. “Expression of the Corynebacterium glutamicum panD gene |
| | | | encoding L-aspartate-alpha-decarboxylase leads to pantothenate |
| | | | overproduction in Escherichia coli,” Appl. Environ. Microbiol., 65(4)1530-1539 |
| | | | (1999) |
| AF124518 | aroD; | 3-dehydroquinase; shikimate | |
| | aroE | dehydrogenase | |
| AF124600 | aroC; | Chorismate synthase; shikimate kinase; 3- | |
| | aroK; | dehydroquinate synthase; putative | |
| | aroB; | cytoplasmic peptidase | |
| | pepQ | | |
| AF145897 | inhA | | |
| AF145898 | inhA | | |
| AJ001436 | ectP | Transport of ectoine, glycine betaine, | Peter, H. et al. “Corynebacterium glutamicum is equipped with four secondary |
| | | proline | carriers for compatible solutes: Identification, sequencing, and characterization |
| | | | of the proline/ectoine uptake system, ProP, and the ectoine/proline/glycine |
| | | | betaine carrier, EctP,” J. Bacteriol., 180(22): 6005-6012 (1998) |
| AJ004934 | dapD | Tetrahydrodipicolinate succinylase | Wehrmann, A. et al. “Different modes of diaminopimelate synthesis and their |
| | | (incompleteⁱ) | role in cell wall integrity: A study with Corynebacterium glutamicum,” J. |
| | | | Bacteriol., 180(12): 3159-3165 (1998) |
| AJ007732 | ppc; | Phosphoenolpyruvate-carboxylase; ?; high | |
| | secG; | affinity ammonium uptake protein; | |
| | amt; | putative ornithine-cyclodecarboxylase; | |
| | ocd; | sarcosine oxidase | |
| | soxA | | |
| AJ010319 | ftsY, | Involved in cell division; PII protein; | Jakoby, M. et al. “Nitrogen regulation in Corynebacterium glutamicum; |
| | glnB, | uridylyltransferase (uridylyl-removing | Isolation of genes involved in biochemical characterization of corresponding |
| | glnD; | enzmye); signal recognition particle; low | proteins,” FEMS Microbiol., 173(2): 303-310 (1999) |
| | srp; | affinity ammonium uptake protein | |
| | amtP | | |
| AJ132968 | cat | Chloramphenicol aceteyl transferase | |
| AJ224946 | mqo | L-malate: quinone oxidoreductase | Molenaar, D. et al. “Biochemical and genetic characterization of the |
| | | | membrane-associated malate dehydrogenase (acceptor) from Corynebacterium |
| | | | glutamicum,” Eur. J. Biochem., 254(2): 395-403 (1998) |
| AJ238250 | ndh | NADH dehydrogenase | |
| AJ238703 | porA | Porin | Lichtinger, T. et al. “Biochemical and biophysical characterization of the cell |
| | | | wall porin of Corynebacterium glutamicum: The channel is formed by a low |
| | | | molecular mass polypeptide,” Biochemistry, 37(43): 15024-15032 (1998) |
| D17429 | | Transposable element IS31831 | Vertes, A. A. et al. “Isolation and characterization of IS31831, a transposable |
| | | | element from Corynebacterium glutamicum,” Mol. Microbiol., 11(4): 739-746 |
| | | | (1994) |
| D84102 | odhA | 2-oxoglutarate dehydrogenase | Usuda, Y. et al. “Molecular cloning of the Corynebacterium glutamicum |
| | | | (Brevibacterium lactofermentum AJ12036) odhA gene encoding a novel type |
| | | | of 2-oxoglutarate dehydrogenase,” Microbiology, 142: 3347-3354 (1996) |
| E01358 | hdh; hk | Homoserine dehydrogenase; homoserine | Katsumata, R. et al. “Production of L-thereonine and L-isoleucine,” Patent: JP |
| | | kinase | 1987232392-A 1 Oct. 12, 1987 |
| E01359 | | Upstream of the start codon of homoserine | Katsumata, R. et al. “Production of L-thereonine and L-isoleucine,” Patent: JP |
| | | kinase gene | 1987232392-A 2 Oct. 12, 1987 |
| E01375 | | Tryptophan operon | |
| E01376 | trpL; | Leader peptide; anthranilate synthase | Matsui, K. et al. “Tryptophan operon, peptide and protein coded thereby, |
| | trpE | | utilization of tryptophan operon gene expression and production of |
| | | | tryptophan,” Patent: JP 1987244382-A 1 Oct. 24, 1987 |
| E01377 | | Promoter and operator regions of | Matsui, K. et al. “Tryptophan operon, peptide and protein coded thereby, |
| | | tryptophan operon | utilization of tryptophan operon gene expression and production of |
| | | | tryptophan,” Patent: JP 1987244382-A 1 Oct. 24, 1987 |
| E03937 | | Biotin-synthase | Hatakeyama, K. et al. “DNA fragment containing gene capable of coding |
| | | | biotin synthetase and its utilization,” Patent: JP 1992278088-A 1 Oct. 02, 1992 |
| E04040 | | Diamino pelargonic acid aminotransferase | Kohama, K. et al. “Gene coding diaminopelargonic acid aminotransferase and |
| | | | desthiobiotin synthetase and its utilization,” Patent: JP 1992330284-A 1 |
| | | | Nov. 18, 1992 |
| E04041 | | Desthiobiotinsynthetase | Kohama, K. et al. “Gene coding diaminopelargonic acid aminotransferase and |
| | | | desthiobiotin synthetase and its utilization,” Patent: JP 1992330284-A 1 |
| | | | Nov. 18, 1992 |
| E04307 | | Flavum aspartase | Kurusu, Y. et al. “Gene DNA coding aspartase and utilization thereof,” Patent: |
| | | | JP 1993030977-A 1 Feb. 09, 1993 |
| E04376 | | Isocitric acid lyase | Katsumata, R. et al. “Gene manifestation controlling DNA,” Patent: JP |
| | | | 1993056782-A 3 Mar. 09, 1993 |
| E04377 | | Isocitric acid lyase N-terminal fragment | Katsumata, R. et al. “Gene manifestation controlling DNA,” Patent: JP |
| | | | 1993056782-A 3 Mar. 09, 1993 |
| E04484 | | Prephenate dehydratase | Sotouchi, N. et al. “Production of L-phenylalanine by fermentation,” Patent: JP |
| | | | 1993076352-A 2 Mar. 30, 1993 |
| E05108 | | Aspartokinase | Fugono, N. et al. “Gene DNA coding Aspartokinase and its use,” Patent: JP |
| | | | 1993184366-A 1 Jul. 27, 1993 |
| E05112 | | Dihydro-dipichorinate synthetase | Hatakeyama, K. et al. “Gene DNA coding dihydrodipicolinic acid synthetase |
| | | | and its use,” Patent: JP 1993184371-A 1 Jul. 27, 1993 |
| E05776 | | Diaminopimelic acid dehydrogenase | Kobayashi, M. et al. “Gene DNA coding Diaminopimelic acid dehydrogenase |
| | | | and its use,” Patent: JP 1993284970-A 1 Nov. 02, 1993 |
| E05779 | | Threonine synthase | Kohama, K. et al. “Gene DNA coding threonine synthase and its use,” Patent: |
| | | | JP 1993284972-A 1 Nov. 02, 1993 |
| E06110 | | Prephenate dehydratase | Kikuchi, T. et al. “Production of L-phenylalanine by fermentation method,” |
| | | | Patent: JP 1993344881-A 1 Dec. 27, 1993 |
| E06111 | | Mutated Prephenate dehydratase | Kikuchi, T. et al. “Production of L-phenylalanine by fermentation method,” |
| | | | Patent: JP 1993344881-A 1 Dec. 27, 1993 |
| E06146 | | Acetohydroxy acid synthetase | Inui, M. et al. “Gene capable of coding Acetohydroxy acid synthetase and its |
| | | | use,” Patent: JP 1993344893-A 1 Dec. 27, 1993 |
| E06825 | | Aspartokinase | Sugimoto, M. et al. “Mutant aspartokinase gene,” patent: JP 1994062866-A 1 |
| | | | Mar. 08, 1994 |
| E06826 | | Mutated aspartokinase alpha subunit | Sugimoto, M. et al. “Mutant aspartokinase gene,” patent: JP 1994062866-A 1 |
| | | | Mar. 08, 1994 |
| E06827 | | Mutated aspartokinase alpha subunit | Sugimoto, M. et al. “Mutant aspartokinase gene,” patent: JP 1994062866-A 1 |
| | | | Mar. 08, 1994 |
| E07701 | secY | | Honno, N. et al. “Gene DNA participating in integration of membraneous |
| | | | protein to membrane,” Patent: JP 1994169780-A 1 Jun. 21, 1994 |
| E08177 | | Aspartokinase | Sato, Y. et al. “Genetic DNA capable of coding Aspartokinase released from |
| | | | feedback inhibition and its utilization,” Patent: JP 1994261766-A 1 Sep. 20, 1994 |
| E08178, | | Feedback inhibition-released | Sato, Y. et al. “Genetic DNA capable of coding Aspartokinase released from |
| E08179, | | Aspartokinase | feedback inhibition and its utilization,” Patent: JP 1994261766-A 1 Sep. 20, 1994 |
| E08180, | | | |
| E08181, | | | |
| E08182 | | | |
| E08232 | | Acetohydroxy-acid isomeroreductase | Inui, M. et al. “Gene DNA coding acetohydroxy acid isomeroreductase,” |
| | | | Patent: JP 1994277067-A 1 Oct. 04, 1994 |
| E08234 | secE | | Asai, Y. et al. “Gene DNA coding for translocation machinery of protein,” |
| | | | Patent: JP 1994277073-A 1 Oct. 04, 1994 |
| E08643 | | FT aminotransferase and desthiobiotin | Hatakeyama, K. et al. “DNA fragment having promoter function in |
| | | synthetase promoter region | coryneform bacterium,” Patent: JP 1995031476-A 1 Feb. 03, 1995 |
| E08646 | | Biotin synthetase | Hatakeyama, K. et al. “DNA fragment having promoter function in |
| | | | coryneform bacterium,” Patent: JP 1995031476-A 1 Feb. 03, 1995 |
| E08649 | | Aspartase | Kohama, K. et al “DNA fragment having promoter function in coryneform |
| | | | bacterium,” Patent: JP 1995031478-A 1 Feb. 03, 1995 |
| E08900 | | Dihydrodipicolinate reductase | Madori, M. et al. “DNA fragment containing gene coding Dihydrodipicolinate |
| | | | acid reductase and utilization thereof,” Patent: JP 1995075578-A 1 Mar. 20, 1995 |
| E08901 | | Diaminopimelic acid decarboxylase | Madori, M. et al. “DNA fragment containing gene coding Diaminopimelic acid |
| | | | decarboxylase and utilization thereof,” Patent: JP 1995075579-A 1 Mar. 20, 1995 |
| E12594 | | Serine hydroxymethyltransferase | Hatakeyama, K. et al. “Production of L-trypophan,” Patent: JP 1997028391-A |
| | | | 1 Feb. 04, 1997 |
| E12760, | | transposase | Moriya, M. et al. “Amplification of gene using artificial transposon,” Patent: |
| E12759, | | | JP 1997070291-A Mar. 18, 1997 |
| E12758 | | | |
| E12764 | | Arginyl-tRNA synthetase; diaminopimelic | Moriya, M. et al. “Amplification of gene using artificial transposon,” Patent: |
| | | acid decarboxylase | JP 1997070291-A Mar. 18, 1997 |
| E12767 | | Dihydrodipicolinic acid synthetase | Moriya, M. et al. “Amplification of gene using artificial transposon,” Patent: |
| | | | JP 1997070291-A Mar. 18, 1997 |
| E12770 | | aspartokinase | Moriya, M. et al. “Amplification of gene using artificial transposon,” Patent: |
| | | | JP 1997070291-A Mar. 18, 1997 |
| E12773 | | Dihydrodipicolinic acid reductase | Moriya, M. et al. “Amplification of gene using artificial transposon,” Patent: |
| | | | JP 1997070291-A Mar. 18, 1997 |
| E13655 | | Glucose-6-phosphate dehydrogenase | Hatakeyama, K. et al. “Glucose-6-phosphate dehydrogenase and DNA capable |
| | | | of coding the same,” Patent: JP 1997224661-A 1 Sep. 02, 1997 |
| L01508 | IlvA | Threonine dehydratase | Moeckel, B. et al. “Functional and structural analysis of the threonine |
| | | | dehydratase of Corynebacterium glutamicum,” J. Bacteriol., 174: 8065-8072 |
| | | | (1992) |
| L07603 | EC | 3-deoxy-D-arabinoheptulosonate-7- | Chen, C. et al. “The cloning and nucleotide sequence of Corynebacterium |
| | 4.2.1.15 | phosphate synthase | glutamicum 3-deoxy-D-arabinoheptulosonate-7-phosphate synthase gene,” |
| | | | FEMS Microbiol. Lett., 107: 223-230 (1993) |
| L09232 | IlvB; | Acetohydroxy acid synthase large subunit; | Keilhauer, C. et al. “Isoleucine synthesis in Corynebacterium glutamicum: |
| | ilvN; | Acetohydroxy acid synthase small subunit; | molecular analysis of the ilvB-ilvN-ilvC operon,” J. Bacteriol., 175(17): 5595-5603 |
| | ilvC | Acetohydroxy acid isomeroreductase | (1993) |
| L18874 | PtsM | Phosphoenolpyruvate sugar | Fouet, A et al. “Bacillus subtilis sucrose-specific enzyme II of the |
| | | phosphotransferase | phosphotransferase system: expression in Escherichia coli and homology to |
| | | | enzymes II from enteric bacteria,” PNAS USA, 84(24): 8773-8777 (1987); Lee, |
| | | | J. K. et al. “Nucleotide sequence of the gene encoding the Corynebacterium |
| | | | glutamicum mannose enzyme II and analyses of the deduced protein |
| | | | sequence,” FEMS Microbiol. Lett., 119(1-2): 137-145 (1994) |
| L27123 | aceB | Malate synthase | Lee, H-S. et al. “Molecular characterization of aceB, a gene encoding malate |
| | | | synthase in Corynebacterium glutamicum,” J. Microbiol. Biotechnol., |
| | | | 4(4): 256-263 (1994) |
| L27126 | | Pyruvate kinase | Jetten, M. S. et al. “Structural and functional analysis of pyruvate kinase from |
| | | | Corynebacterium glutamicum,” Appl. Environ. Microbiol., 60(7): 2501-2507 |
| | | | (1994) |
| L28760 | aceA | Isocitrate lyase | |
| L35906 | dtxr | Diphtheria toxin repressor | Oguiza, J. A. et al. “Molecular cloning, DNA sequence analysis, and |
| | | | characterization of the Corynebacterium diphtheriae dtxR from Brevibacterium |
| | | | lactofermentum,” J. Bacteriol., 177(2): 465-467 (1995) |
| M13774 | | Prephenate dehydratase | Follettie, M. T. et al. “Molecular cloning and nucleotide sequence of the |
| | | | Corynebacterium glutamicum pheA gene,” J. Bacteriol., 167: 695-702 (1986) |
| M16175 | 5S | | Park, Y-H. et al. “Phylogenetic analysis of the coryneform bacteria by 56 |
| | rRNA | | rRNA sequences,” J. Bacteriol., 169: 1801-1806 (1987) |
| M16663 | trpE | Anthranilate synthase, 5′ end | Sano, K. et al. “Structure and function of the trp operon control regions of |
| | | | Brevibacterium lactofermentum, a glutamic-acid-producing bacterium,” Gene, |
| | | | 52: 191-200 (1987) |
| M16664 | trpA | Tryptophan synthase, 3′end | Sano, K. et al. “Structure and function of the trp operon control regions of |
| | | | Brevibacterium lactofermentum, a glutamic-acid-producing bacterium,” Gene, |
| | | | 52: 191-200 (1987) |
| M25819 | | Phosphoenolpyruvate carboxylase | O'Regan, M. et al. “Cloning and nucleotide sequence of the |
| | | | Phosphoenolpyruvate carboxylase-coding gene of Corynebacterium |
| | | | glutamicum ATCC13032,” Gene, 77(2): 237-251 (1989) |
| M85106 | | 23S rRNA gene insertion sequence | Roller, C. et al. “Gram-positive bacteria with a high DNA G + C content are |
| | | | characterized by a common insertion within their 23S rRNA genes,” J. Gen. |
| | | | Microbiol., 138: 1167-1175 (1992) |
| M85107, | | 23S rRNA gene insertion sequence | Roller, C. et al. “Gram-positive bacteria with a high DNA G + C content are |
| M85108 | | | characterized by a common insertion within their 23S rRNA genes,” J. Gen. |
| | | | Microbiol., 138: 1167-1175 (1992) |
| M89931 | aecD; | Beta C-S lyase; branched-chain amino | Rossol, I. et al. “The Corynebacterium glutamicum aecD gene encodes a C-S |
| | brnQ; | acid uptake carrier; hypothetical protein | lyase with alpha, beta-elimination activity that degrades aminoethylcysteine,” |
| | yhbw | | yhbw J. Bacteriol., 174(9): 2968-2977 (1992); Tauch, A. et al. “Isoleucine uptake in |
| | | | Corynebacterium glutamicum ATCC 13032 is directed by the brnQ gene |
| | | | product,” Arch. Microbiol., 169(4): 303-312 (1998) |
| S59299 | trp | Leader gene (promoter) | Herry, D. M. et al. “Cloning of the trp gene cluster from a tryptophan- |
| | | | hyperproducing strain of Corynebacterium glutamicum: identification of a |
| | | | mutation in the trp leader sequence,” Appl. Environ. Microbiol., 59(3): 791-799 |
| | | | (1993) |
| U11545 | trpD | Anthranilate phosphoribosyltransferase | O'Gara, J. P. and Dunican, L. K. (1994) Complete nucleotide sequence of the |
| | | | Corynebacterium glutamicum ATCC 21850 tpD gene.” Thesis, Microbiology |
| | | | Department, University College Galway, Ireland. |
| U13922 | cglIM; | Putative type II 5-cytosoine | Schafer, A. et al. “Cloning and characterization of a DNA region encoding a |
| | cglIR; | methyltransferase; putative type II | stress-sensitive restriction system from Corynebacterium glutamicum ATCC |
| | clgIIR | restriction endonuclease; putative type I or | 13032 and analysis of its role in intergeneric conjugation with Escherichia |
| | | type III restriction endonuclease | coli,” J. Bacteriol., 176(23): 7309-7319 (1994); Schafer, A. et al. “The |
| | | | Corynebacterium glutamicum cglIM gene encoding a 5-cytosine in an McrBC- |
| | | | deficient Escherichia coli strain,” Gene, 203(2): 95-101 (1997) |
| U14965 | recA | | |
| U31224 | ppx | | Ankri, S. et al. “Mutations in the Corynebacterium glutamicumproline |
| | | | biosynthetic pathway: A natural bypass of the proA step,” J. Bacteriol., |
| | | | 178(15): 4412-4419 (1996) |
| U31225 | proC | L-proline: NADP+ 5-oxidoreductase | Ankri, S. et al. “Mutations in the Corynebacterium glutamicumproline |
| | | | biosynthetic pathway: A natural bypass of the proA step,” J. Bacteriol., |
| | | | 178(15): 4412-4419 (1996) |
| U31230 | obg; | ?; gamma glutamyl kinase; similar to D- | Ankri, S. et al. “Mutations in the Corynebacterium glutamicumproline |
| | proB; | isomer specific 2-hydroxyacid | biosynthetic pathway: A natural bypass of the proA step,” J. Bacteriol., |
| | unkdh | dehydrogenases | 178(15): 4412-4419 (1996) |
| U31281 | bioB | Biotin synthase | Serebriiskii, I. G., “Two new members of the bio B superfamily: Cloning, |
| | | | sequencing and expression of bio B genes of Methylobacillus flagellatum and |
| | | | Corynebacterium glutamicum,” Gene, 175: 15-22 (1996) |
| U35023 | thtR; | Thiosulfate sulfurtransferase; acyl CoA | Jager, W. et al. “A Corynebacterium glutamicum gene encoding a two-domain |
| | accBC | carboxylase | protein similar to biotin carboxylases and biotin-carboxyl-carrier proteins,” |
| | | | Arch. Microbiol., 166(2); 76-82 (1996) |
| U43535 | cmr | Multidrug resistance protein | Jager, W. et al. “A Corynebacterium glutamicum gene conferring multidrug |
| | | | resistance in the heterologous host Escherichia coli,” J. Bacteriol., |
| | | | 179(7): 2449-2451 (1997) |
| U43536 | clpB | Heat shock ATP-binding protein | |
| U53587 | aphA-3 | 3′5″-aminoglycoside phosphotransferase | |
| U89648 | | Corynebacterium glutamicum unidentified | |
| | | sequence involved in histidine | |
| | | biosynthesis, partial sequence | |
| X04960 | trpA; | Tryptophan operon | Matsui, K. et al. “Complete nucleotide and deduced amino acid sequences of |
| | trpB; | | the Brevibacterium lactofermentum tryptophan operon,” Nucleic Acids Res., |
| | trpC; | | 14(24): 10113-10114 (1986) |
| | trpD; | | |
| | trpE; | | |
| | trpG; | | |
| | trpL | | |
| X07563 | lys A | DAP decarboxylase (meso- | Yeh, P. et al. “Nucleic sequence of the lysA gene of Corynebacterium |
| | | diaminopimelate decarboxylase, | glutamicum and possible mechanisms for modulation of its expression,” Mol. |
| | | EC 4.1.1.20) | Gen. Genet., 212(1): 112-119 (1988) |
| X14234 | EC | Phosphoenolpyruvate carboxylase | Eikmanns, B. J. et al. “The Phosphoenolpyruvate carboxylase gene of |
| | 4.1.1.31 | | Corynebacterium glutamicum: Molecular cloning, nucleotide sequence, and |
| | | | expression,” Mol. Gen. Genet., 218(2): 330-339 (1989); Lepiniec, L. et al. |
| | | | “Sorghum Phosphoenolpyruvate carboxylase gene family: structure, function |
| | | | and molecular evolution,” Plant. Mol. Biol., 21 (3): 487-502 (1993) |
| X17313 | fda | Fructose-bisphosphate aldolase | Von der Osten, C. H. et al. “Molecular cloning, nucleotide sequence and fine- |
| | | | structural analysis of the Corynebacterium glutamicum fda gene: structural |
| | | | comparison of C. glutamicum fructose-1, 6-biphosphate aldolase to class I and |
| | | | class II aldolases,” Mol. Microbiol., |
| X53993 | dapA | L-2, 3-dihydrodipicolinate synthetase (EC | Bonnassie, S. et al. “Nucleic sequence of the dapA gene from |
| | | 4.2.1.52) | Corynebacterium glutamicum,” Nucleic Acids Res., 18(21): 6421 (1990) |
| X54223 | | AttB-related site | Cianciotto, N. et al. “DNA sequence homology between att B-related sites of |
| | | | Corynebacterium diphtheriae, Corynebacterium ulcerans, Corynebacterium |
| | | | glutamicum, and the attP site of lambdacorynephage,” FEMS. Microbiol, |
| | | | Lett., 66: 299-302 (1990) |
| X54740 | argS; | Arginyl-tRNA synthetase; | Marcel, T. et al. “Nucleotide sequence and organization of the upstream region |
| | lysA | Diaminopimelate decarboxylase | of the Corynebacterium glutamicum lysA gene,” Mol. Microbiol., 4(11): 1819-1830 |
| | | | (1990) |
| X55994 | trpL; | Putative leader peptide; anthranilate | Heery, D. M. et al. “Nucleotide sequence of the Corynebacterium glutamicum |
| | trpE | synthase component 1 | trpE gene,” Nucleic Acids Res., 18(23): 7138 (1990) |
| X56037 | thrC | Threonine synthase | Han, K. S. et al. “The molecular structure of the Corynebacterium glutamicum |
| | | | threonine synthase gene,” Mol. Microbiol., 4(10): 1693-1702 (1990) |
| X56075 | attB- | Attachment site | Cianciotto, N. et al. “DNA sequence homology between att B-related sites of |
| | related | | Corynebacterium diphtheriae, Corynebacterium ulcerans, Corynebacterium |
| | site | | glutamicum, and the attP site of lambdacorynephage,” FEMS. Microbiol, |
| | | | Lett., 66: 299-302 (1990) |
| X57226 | lysC- | Aspartokinase-alpha subunit; | Kalinowski, J. et al. “Genetic and biochemical analysis of the Aspartokinase |
| | alpha; | Aspartokinase-beta subunit; aspartate beta | from Corynebacterium glutamicum,” Mol. Microbiol., 5(5): 1197-1204 (1991); |
| | lysC- | semialdehyde dehydrogenase | Kalinowski, J. et al. “Aspartokinase genes lysC alpha and lysC beta overlap |
| | beta; | | and are adjacent to the aspertate beta-semialdehyde dehydrogenase gene asd in |
| | asd | | Corynebacterium glutamicum,” Mol. Gen. Genet., 224(3): 317-324 (1990) |
| X59403 | gap; | Glyceraldehyde-3-phosphate; | Eikmanns, B. J. “Identification, sequence analysis, and expression of a |
| | pgk; | phosphoglycerate kinase; triosephosphate | Corynebacterium glutamicum gene cluster encoding the three glycolytic |
| | tpi | isomerase | enzymes glyceraldehyde-3-phosphate dehydrogenase, 3-phosphoglycerate |
| | | | kinase, and triosephosphate isomeras,” J. Bacteriol., 174(19): 6076-6086 |
| | | | (1992) |
| X59404 | gdh | Glutamate dehydrogenase | Bormann, E. R. et al. “Molecular analysis of the Corynebacterium glutamicum |
| | | | gdh gene encoding glutamate dehydrogenase,” Mol. Microbiol., 6(3): 317-326 |
| | | | (1992) |
| X60312 | lysI | L-lysine permease | Seep-Feldhaus, A. H. et al. “Molecular analysis of the Corynebacterium |
| | | | glutamicum lysl gene involved in lysine uptake,” Mol. Microbiol., 5(12): |
| | | | 2995-3005 (1991) |
| X66078 | cop1 | Ps1 protein | Joliff, G. et al. “Cloning and nucleotide sequence of the csp1 gene encoding |
| | | | PS1, one of the two major secreted proteins of Corynebacterium glutamicum: |
| | | | The deduced N-terminal region of PS1 is similar to the Mycobacterium antigen |
| | | | 85 complex,” Mol. Microbiol., 6(16): 2349-2362 (1992) |
| X66112 | glt | Citrate synthase | Eikmanns, B. J. et al. “Cloning sequence, expression and transcriptional |
| | | | analysis of the Corynebacterium glutamicum gltA gene encoding citrate |
| | | | synthase,” Microbiol., 140: 1817-1828 (1994) |
| X67737 | dapB | Dihydrodipicolinate reductase | |
| X69103 | csp2 | Surface layer protein PS2 | Peyret, J. L. et al. “Characterization of the cspB gene encoding PS2, an ordered |
| | | | surface-layer protein in Corynebacterium glutamicum,” Mol. Microbiol., |
| | | | 9(1): 97-109 (1993) |
| X69104 | | IS3 related insertion element | Bonamy, C. et al. “Identification of IS1206, a Corynebacterium glutamicum |
| | | | IS3-related insertion sequence and phylogenetic analysis,” Mol. Microbiol., |
| | | | 14(3): 571-581 (1994) |
| X70959 | leuA | Isopropylmalate synthase | Patek, M. et al. “Leucine synthesis in Corynebacterium glutamicum: enzyme |
| | | | activities, structure of leuA, and effect of leuA inactivation on lysine |
| | | | synthesis,” Appl. Environ. Microbiol., 60(1): 133-140 (1994) |
| X71489 | icd | Isocitrate dehydrogenase (NADP+) | Eikmanns, B. J. et al. “Cloning sequence analysis, expression, and inactivation |
| | | | of the Corynebacterium glutamicum icd gene encoding isocitrate |
| | | | dehydrogenase and biochemical characterization of the enzyme,” J. Bacteriol., |
| | | | 177(3): 774-782 (1995) |
| X72855 | GDHA | Glutamate dehydrogenase (NADP+) | |
| X75083, | mtrA | 5-methyltryptophan resistance | Heery, D. M. et al. “A sequence from a tryptophan-hyperproducing strain of |
| X70584 | | | Corynebacterium glutamicum encoding resistance to 5-methyltryptophan,” |
| | | | Biochem. Biophys. Res. Commun., 201(3): 1255-1262 (1994) |
| X75085 | recA | | Fitzpatrick, R. et al. “Construction and characterization of recA mutant strains |
| | | | of Corynebacterium glutamicum and Brevibacterium lactofermentum,” Appl. |
| | | | Microbiol. Biotechnol., 42(4): 575-580 (1994) |
| X75504 | aceA; | Partial Isocitrate lyase; ? | Reinscheid, D. J. et al. “Characterization of the isocitrate lyase gene from |
| | thiX | | Corynebacterium glutamicum and biochemical analysis of the enzyme,” J. |
| | | | Bacteriol., 176(12): 3474-3483 (1994) |
| X76875 | | ATPase beta-subunit | Ludwig, W. et al. “Phylogenetic relationships of bacteria based on comparative |
| | | | sequence analysis of elongation factor Tu and ATP-synthase beta-subunit |
| | | | genes,” Antonie Van Leeuwenhoek, 64: 285-305 (1993) |
| X77034 | tuf | Elongation factor Tu | Ludwig, W. et al. “Phylogenetic relationships of bacteria based on comparative |
| | | | sequence analysis of elongation factor Tu and ATP-synthase beta-subunit |
| | | | genes,” Antonie Van Leeuwenhoek, 64: 285-305 (1993) |
| X77384 | recA | | Billman-Jacobe, H. “Nucleotide sequence of a recA gene from |
| | | | Corynebacterium glutamicum,” DNA Seq., 4(6): 403-404 (1994) |
| X78491 | aceB | Malate synthase | Reinscheid, D. J. et al. “Malate synthase from Corynebacterium glutamicum |
| | | | pta-ack operon encoding phosphotransacetylase: sequence analysis,” |
| | | | Microbiology, 140: 3099-3108 (1994) |
| X80629 | 16S | 16S ribosomal RNA | Rainey, F. A. et al. “Phylogenetic analysis of the genera Rhodococcus and |
| | rDNA | | Norcardia and evidence for the evolutionary origin of the genus Norcardia |
| | | | from within the radiation of Rhodococcus species,” Microbiol., 141: 523-528 |
| | | | (1995) |
| X81191 | gluA; | Glutamate uptake system | Kronemeyer, W. et al. “Structure of the gluABCD cluster encoding the |
| | gluB; | | glutamate uptake system of Corynebacterium glutamicum,” J. Bacteriol., |
| | gluC; | | 177(5): 1152-1158 (1995) |
| | gluD | | |
| X81379 | dapE | Succinyldiaminopimelate desuccinylase | Wehrmann, A. et al. “Analysis of different DNA fragments of |
| | | | Corynebacterium glutamicum complementing dapE of Escherichia coli,” |
| | | | Microbiology, 40: 3349-56 (1994) |
| X82061 | 16S | 16S ribosomal RNA | Ruimy, R. et al. “Phylogeny of the genus Corynebacterium deduced from |
| | rDNA | | analyses of small-subunit ribosomal DNA sequences,” Int. J. Syst. Bacteriol., |
| | | | 45(4): 740-746 (1995) |
| X82928 | asd; | Aspartate-semialdehyde dehydrogenase; ? | Serebrijski, I. et al. “Multicopy suppression by asd gene and osmotic stress- |
| | lysC | | dependent complementation by heterologous proA in proA mutants,” J. |
| | | | Bacteriol., 177(24): 7255-7260 (1995) |
| X82929 | proA | Gamma-glutamyl phosphate reductase | Serebrijski, I. et al. “Multicopy suppression by asd gene and osmotic stress- |
| | | | dependent complementation by heterologous proA in proA mutants,” J. |
| | | | Bacteriol., 177(24): 7255-7260 (1995) |
| X84257 | 16S | 16S ribosomal RNA | Pascual, C. et al. “Phylogenetic analysis of the genus Corynebacterium based |
| | rDNA | | on 16S rRNA gene sequences,” Int. J. Syst. Bacteriol., 45(4): 724-728 (1995) |
| X85965 | aroP; | Aromatic amino acid permease; ? | Wehrmann, A. et al. “Functional analysis of sequences adjacent to dapE of |
| | dapE | | Corynebacterium glutamicum proline reveals the presence of aroP, which |
| | | | encodes the aromatic amino acid transporter,” J. Bacteriol., 177(20): 5991-5993 |
| | | | (1995) |
| X86157 | argB; | Acetylglutamate kinase; N-acetyl-gamma- | Sakanyan, V. et al. “Genes and enzymes of the acetyl cycle of arginine |
| | argC; | glutamyl-phosphate reductase; | biosynthesis in Corynebacterium glutamicum: enzyme evolution in the early |
| | argD; | acetylornithine aminotransferase; ornithine | steps of the arginine pathway,” Microbiology, 142: 99-108 (1996) |
| | argF; | carbamoyltransferase; glutamate N- | |
| | argJ | acetyltransferase | |
| X89084 | pta; | Phosphate acetyltransferase; acetate kinase | Reinscheid, D. J. et al. “Cloning, sequence analysis, expression and inactivation |
| | ackA | | of the Corynebacterium glutamicum pta-ack operon encoding |
| | | | phosphotransacetylase and acetate kinase,” Microbiology, 145: 503-513 (1999) |
| X89850 | attB | Attachment site | Le Marrec, C. et al. “Genetic characterization of site-specific integration |
| | | | functions of phi AAU2 infecting “Arthrobacter aureus C70,” J. Bacteriol., |
| | | | 178(7): 1996-2004 (1996) |
| X90356 | | Promoter fragment F1 | Patek, M. et al. “Promoters from Corynebacterium glutamicum: cloning, |
| | | | molecular analysis and search for a consensus motif,” Microbiology, |
| | | | 142: 1297-1309 (1996) |
| X90357 | | Promoter fragment F2 | Patek, M. et al. “Promoters from Corynebacterium glutainicum: cloning, |
| | | | molecular analysis and search for a consensus motif,” Microbiology, |
| | | | 142: 1297-1309 (1996) |
| X90358 | | Promoter fragment F10 | Patek, M. et al. “Promoters from Corynebacterium glutaniicum: cloning, |
| | | | molecular analysis and search for a consensus motif,” Microbiology, |
| | | | 142: 1297-1309 (1996) |
| X90359 | | Promoter fragment F13 | Patek, M. et al. “Promoters from Corynebacterium glutamicum: cloning, |
| | | | molecular analysis and search for a consensus motif,” Microbiology, |
| | | | 142: 1297-1309 (1996) |
| X90360 | | Promoter fragment F22 | Patek, M. et al. “Promoters from Corynebacterium glutamicum: cloning, |
| | | | molecular analysis and search for a consensus motif,” Microbiology, |
| | | | 142: 1297-1309 (1996) |
| X90361 | | Promoter fragment F34 | Patek, M. et al. “Promoters from Corynebacterium glutamicum: cloning, |
| | | | molecular analysis and search for a consensus motif,” Microbiology, |
| | | | 142: 1297-1309 (1996) |
| X90362 | | Promoter fragment F37 | Patek, M. et al. “Promoters from Corynebacterium glutamicum: cloning, |
| | | | molecular analysis and search for a consensus motif,” Microbiology, |
| | | | 142: 1297-1309 (1996) |
| X90363 | | Promoter fragment F45 | Patek, M. et al. “Promoters from Corynebacterium glutamicum: cloning, |
| | | | molecular analysis and search for a consensus motif,” Microbiology, |
| | | | 142: 1297-1309 (1996) |
| X90364 | | Promoter fragment F64 | Patek, M. et al. “Promoters from Corynebacterium glutamicum: cloning, |
| | | | molecular analysis and search for a consensus motif,” Microbiology, |
| | | | 142: 1297-1309 (1996) |
| X90365 | | Promoter fragment F75 | Patek, M. et al. “Promoters from Corynebacterium glutamicum: cloning, |
| | | | molecular analysis and search for a consensus motif,” Microbiology, |
| | | | 142: 1297-1309 (1996) |
| X90366 | | Promoter fragment PF101 | Patek, M. et al. “Promoters from Corynebacterium glutamicum: cloning, |
| | | | molecular analysis and search for a consensus motif,” Microbiology, |
| | | | 142: 1297-1309 (1996) |
| X90367 | | Promoter fragment PF104 | Patek, M. et al. “Promoters from Corynebacterium glutamicum: cloning, |
| | | | molecular analysis and search for a consensus motif,” Microbiology, |
| | | | 142: 1297-1309 (1996) |
| X90368 | | Promoter fragment PF109 | Patek, M. et al. “Promoters from Corynebacterium glutamicum: cloning, |
| | | | molecular analysis and search for a consensus motif,” Microbiology, |
| | | | 142: 1297-1309 (1996) |
| X93513 | amt | Ammonium transport system | Siewe, R. M. et al. “Functional and genetic characterization of the (methyl) |
| | | | ammonium uptake carrier of Corynebacterium glutamicum,” J. Biol. Chem., |
| | | | 271(10): 5398-5403 (1996) |
| X93514 | betP | Glycine betaine transport system | Peter, H. et al. “Isolation, characterization, and expression of the |
| | | | Corynebacterium glutamicum betP gene, encoding the transport system for the |
| | | | compatible solute glycine betaine,” J. Bacteriol., 178(17): 5229-5234 (1996) |
| X95649 | orf4 | | Patek, M. et al. “Identification and transcriptional analysis of the dapB-ORF2- |
| | | | dapA-ORF4 operon of Corynebacterium glutamicum, encoding two enzymes |
| | | | involved in L-lysine synthesis,” Biotechnol. Lett., 19: 1113-1117 (1997) |
| X96471 | lysE; | Lysine exporter protein; Lysine export | Vrljic, M. et al. “A new type of transporter with a new type of cellular |
| | lysG | regulator protein | function: L-lysine export from Corynebacterium glutamicum,” Mol. |
| | | | Microbiol., 22(5): 815-826 (1996) |
| X96580 | panB; | 3-methyl-2-oxobutanoate | Sahm, H. et al. “D-pantothenate synthesis in Corynebacterium glutamicum and |
| | panC; | hydroxymethyltransferase; pantoate-beta- | use of panBC and genes encoding L-valine synthesis for D-pantothenate |
| | xylB | alanine ligase; xylulokinase | overproduction,” Appl. Environ. Microbiol., 65(5): 1973-1979 (1999) |
| X96962 | | Insertion sequence IS1207 and transposase | |
| X99289 | | Elongation factor P | Ramos, A. et al. “Cloning, sequencing and expression of the gene encoding |
| | | | elongation factor P in the amino-acid producer Brevibacterium lactofermentum |
| | | | (Corynebacterium glutamicum ATCC 13869),” Gene, 198: 217-222 (1997) |
| Y00140 | thrB | Homoserine kinase | Mateos, L. M. et al. “Nucleotide sequence of the homoserine kinase (thrB) gene |
| | | | of the Brevibacterium lactofermentum,” Nucleic Acids Res., 15(9): 3922 (1987) |
| Y00151 | ddh | Meso-diaminopimelate D-dehydrogenase | Ishino, S. et al. “Nucleotide sequence of the meso-diaminopimelate D- |
| | | (EC 1.4.1.16) | dehydrogenase gene from Corynebacterium glutamicum,” Nucleic Acids Res., |
| | | | 15(9): 3917 (1987) |
| Y00476 | thrA | Homoserine dehydrogenase | Mateos, L. M. et al. “Nucleotide sequence of the homoserine dehydrogenase |
| | | | (thrA) gene of the Brevibacterium lactofermentum,” Nucleic Acids Res., |
| | | | 15(24): 10598 (1987) |
| Y00546 | hom; | Homoserine dehydrogenase; homoserine | Peoples, O. P. et al. “Nucleotide sequence and fine structural analysis of the |
| | thrB | kinase | Corynebacterium glutamicum hom-thrB operon,” Mol. Microbiol., 2(1): 63-72 |
| | | | (1988) |
| Y08964 | murC; | UPD-N-acetylmuramate-alanine ligase; | Honrubia, M. P. et al. “Identification, characterization, and chromosomal |
| | ftsQ/ | division initiation protein or cell division | organization of the ftsZ gene from Brevibacterium lactofermentum,” Mol. Gen. |
| | divD; | protein; cell division protein | Genet., 259(1): 97-104 (1998) |
| | ftsZ | | |
| Y09163 | putP | High affinity proline transport system | Peter, H. et al. “Isolation of the putP gene of Corynebacterium |
| | | | glutamicum proline and characterization of a low-affinity uptake system for |
| | | | compatible solutes,” Arch. Microbiol., 168(2): 143-151 (1997) |
| Y09548 | pyc | Pyruvate carboxylase | Peters-Wendisch, P. G. et al. “Pyruvate carboxylase from Corynebacterium |
| | | | glutamicum: characterization, expression and inactivation of the pyc gene,” |
| | | | Microbiology, 144: 915-927 (1998) |
| Y09578 | leuB | 3-isopropylmalate dehydrogenase | Patek, M. et al. “Analysis of the leuB gene from Corynebacterium |
| | | | glutamicum,” Appl. Microbiol. Biotechnol., 50(1): 42-47 (1998) |
| Y12472 | | Attachment site bacteriophage Phi-16 | Moreau, S. et al. “Site-specific integration of corynephage Phi-16: The |
| | | | construction of an integration vector,” Microbiol., 145: 539-548 (1999) |
| Y12537 | proP | Proline/ectoine uptake system protein | Peter, H. et al. “Corynebacterium glutamicum is equipped with four secondary |
| | | | carriers for compatible solutes: Identification, sequencing, and characterization |
| | | | of the proline/ectoine uptake system, ProP, and the ectoine/proline/glycine |
| | | | betaine carrier, EctP,” J. Bacteriol., 180(22): 6005-6012 (1998) |
| Y13221 | glnA | Glutamine synthetase 1 | Jakoby, M. et al. “Isolation of Corynebacterium glutamicum glnA gene |
| | | | encoding glutamine synthetase I,” FEMS Microbiol. Lett., 154(1): 81-88 (1997) |
| Y16642 | lpd | Dihydrolipoamide dehydrogenase | |
| Y18059 | | Attachment site Corynephage 304L | Moreau, S. et al. “Analysis of the integration functions of &phi; 304L: An |
| | | | integrase module among corynephages,” Virology, 255(1): 150-159 (1999) |
| Z21501 | argS; | Arginyl-tRNA synthetase; | Oguiza, J. A. et al. “A gene encoding arginyl-tRNA synthetase is located in the |
| | lysA | diaminopimelate decarboxylase (partial) | upstream region of the lysA gene in Brevibacterium lactofermentum: |
| | | | Regulation of argS-lysA cluster expression by arginine,” J. |
| | | | Bacteriol., 175(22): 7356-7362 (1993) |
| Z21502 | dapA; | Dihydrodipicolinate synthase; | Pisabarro, A. et al. “A cluster of three genes (dapA, orf2, and dapB) of |
| | dapB | dihydrodipicolinate reductase | Brevibacterium lactofermentum encodes dihydrodipicolinate reductase, and a |
| | | | third polypeptide of unknown function,” J. Bacteriol., 175(9): 2743-2749 |
| | | | (1993) |
| Z29563 | thrC | Threonine synthase | Malumbres, M. et al. “Analysis and expression of the thrC gene of the encoded |
| | | | threonine synthase,” Appl. Environ. Microbiol., 60(7)2209-2219 (1994) |
| Z46753 | 16S | Gene for 16S ribosomal RNA | |
| | rDNA | | |
| Z49822 | sigA | SigA sigma factor | Oguiza, J. A. et al. “Multiple sigma factor genes in Brevibacterium |
| | | | lactofermentum: Characterization of sigA and sigB,” J. Bacteriol., 178(2): 550-553 |
| | | | (1996) |
| Z49823 | galE; | Catalytic activity UDP-galactose 4- | Oguiza, J. A. et al “The galE gene encoding the UDP-galactose 4-epimerase of |
| | dtxR | epimerase; diphtheria toxin regulatory | Brevibacterium lactofermentum is coupled transcriptionally to the dmdR |
| | | protein | gene,” Gene, 177: 103-107 (1996) |
| Z49824 | orfl; | ?; SigB sigma factor | Oguiza, J. A. et al “Multiple sigma factor genes in Brevibacterium |
| | sigB | | lactofermentum: Characterization of sigA and sigB,” J. Bacteriol., 178(2): 550-553 |
| | | | (1996) |
| Z66534 | | Transposase | Correia, A. et al. “Cloning and characterization of an IS-like element present in |
| | | | the genome of Brevibacterium lactofermentum ATCC 13869,” Gene, |
| | | | 170(1): 91-94 (1996) |

¹A sequence for this gene was published in the indicated reference. However, the sequence obtained by the inventors of the present application is significantly longer than the published version. It is believed that the published version relied on an incorrect start codon, and thus represents only a fragment of the actual coding region.

[0180] TABLE 3
Corynebacterium and Brevibacterium Strains Which May be Used in the Practice of the Invention

| Genus | species | ATCC | FERM | NRRL | CECT | NCIMB | CBS | NCTC | DSMZ |
|---|---|---|---|---|---|---|---|---|---|
| Brevibacterium | ammoniagenes | 21054 | | | | | | | |
| Brevibacterium | ammoniagenes | 19350 | | | | | | | |
| Brevibacterium | ammoniagenes | 19351 | | | | | | | |
| Brevibacterium | ammoniagenes | 19352 | | | | | | | |
| Brevibacterium | ammoniagenes | 19353 | | | | | | | |
| Brevibacterium | ammoniagenes | 19354 | | | | | | | |
| Brevibacterium | ammoniagenes | 19355 | | | | | | | |
| Brevibacterium | ammoniagenes | 19356 | | | | | | | |
| Brevibacterium | ammoniagenes | 21055 | | | | | | | |
| Brevibacterium | ammoniagenes | 21077 | | | | | | | |
| Brevibacterium | ammoniagenes | 21553 | | | | | | | |
| Brevibacterium | ammoniagenes | 21580 | | | | | | | |
| Brevibacterium | ammoniagenes | 39101 | | | | | | | |
| Brevibacterium | butanicum | 21196 | | | | | | | |
| Brevibacterium | divaricatum | 21792 | P928 | | | | | | |
| Brevibacterium | flavum | 21474 | | | | | | | |
| Brevibacterium | flavum | 21129 | | | | | | | |
| Brevibacterium | flavum | 21518 | | | | | | | |
| Brevibacterium | flavum | | | B11474 | | | | | |
| Brevibacterium | flavum | | | B11472 | | | | | |
| Brevibacterium | flavum | 21127 | | | | | | | |
| Brevibacterium | flavum | 21128 | | | | | | | |
| Brevibacterium | flavum | 21427 | | | | | | | |
| Brevibacterium | flavum | 21475 | | | | | | | |
| Brevibacterium | flavum | 21517 | | | | | | | |
| Brevibacterium | flavum | 21528 | | | | | | | |
| Brevibacterium | flavum | 21529 | | | | | | | |
| Brevibacterium | flavum | | | B11477 | | | | | |
| Brevibacterium | flavum | | | B11478 | | | | | |
| Brevibacterium | flavum | 21127 | | | | | | | |
| Brevibacterium | flavum | | | B11474 | | | | | |
| Brevibacterium | healii | 15527 | | | | | | | |
| Brevibacterium | ketoglutamicum | 21004 | | | | | | | |
| Brevibacterium | ketoglutamicum | 21089 | | | | | | | |
| Brevibacterium | ketosoreductum | 21914 | | | | | | | |
| Brevibacterium | lactofermentum | | | | 70 | | | | |
| Brevibacterium | lactofermentum | | | | 74 | | | | |
| Brevibacterium | lactofermentum | | | | 77 | | | | |
| Brevibacterium | lactofermentum | 21798 | | | | | | | |
| Brevibacterium | lactofermentum | 21799 | | | | | | | |
| Brevibacterium | lactofermentum | 21800 | | | | | | | |
| Brevibacterium | lactofermentum | 21801 | | | | | | | |
| Brevibacterium | lactofermentum | | | B11470 | | | | | |
| Brevibacterium | lactofermentum | | | B11471 | | | | | |
| Brevibacterium | lactofermentum | 21086 | | | | | | | |
| Brevibacterium | lactofermentum | 21420 | | | | | | | |
| Brevibacterium | lactofermentum | 21086 | | | | | | | |
| Brevibacterium | lactofermentum | 31269 | | | | | | | |
| Brevibacterium | linens | 9174 | | | | | | | |
| Brevibacterium | linens | 19391 | | | | | | | |
| Brevibacterium | linens | 8377 | | | | | | | |
| Brevibacterium | paraffinolyticum | | | | | 11160 | | | |
| Brevibacterium | spec. | | | | | | 717.73 | | |
| Brevibacterium | spec. | | | | | | 717.73 | | |
| Brevibacterium | spec. | 14604 | | | | | | | |
| Brevibacterium | spec. | 21860 | | | | | | | |
| Brevibacterium | spec. | 21864 | | | | | | | |
| Brevibacterium | spec. | 21865 | | | | | | | |
| Brevibacterium | spec. | 21866 | | | | | | | |
| Brevibacterium | spec. | 19240 | | | | | | | |
| Corynebacterium | acetoacidophilum | 21476 | | | | | | | |
| Corynebacterium | acetoacidophilum | 13870 | | | | | | | |
| Corynebacterium | acetoglutamicum | | | B11473 | | | | | |
| Corynebacterium | acetoglutamicum | | | B11475 | | | | | |
| Corynebacterium | acetoglutamicum | 15806 | | | | | | | |
| Corynebacterium | acetoglutamicum | 21491 | | | | | | | |
| Corynebacterium | acetoglutamicum | 31270 | | | | | | | |
| Corynebacterium | acetophilum | | | B3671 | | | | | |
| Corynebacterium | ammoniagenes | 6872 | | | | | | 2399 | |
| Corynebacterium | ammoniagenes | 15511 | | | | | | | |
| Corynebacterium | fujiokense | 21496 | | | | | | | |
| Corynebacterium | glutamicum | 14067 | | | | | | | |
| Corynebacterium | glutamicum | 39137 | | | | | | | |
| Corynebacterium | glutamicum | 21254 | | | | | | | |
| Corynebacterium | glutamicum | 21255 | | | | | | | |
| Corynebacterium | glutamicum | 31830 | | | | | | | |
| Corynebacterium | glutamicum | 13032 | | | | | | | |
| Corynebacterium | glutamicum | 14305 | | | | | | | |
| Corynebacterium | glutamicum | 15455 | | | | | | | |
| Corynebacterium | glutamicum | 13058 | | | | | | | |
| Corynebacterium | glutamicum | 13059 | | | | | | | |
| Corynebacterium | glutamicum | 13060 | | | | | | | |
| Corynebacterium | glutamicum | 21492 | | | | | | | |
| Corynebacterium | glutamicum | 21513 | | | | | | | |
| Corynebacterium | glutamicum | 21526 | | | | | | | |
| Corynebacterium | glutamicum | 21543 | | | | | | | |
| Corynebacterium | glutamicum | 13287 | | | | | | | |
| Corynebacterium | glutamicum | 21851 | | | | | | | |
| Corynebacterium | glutamicum | 21253 | | | | | | | |
| Corynebacterium | glutamicum | 21514 | | | | | | | |
| Corynebacterium | glutamicum | 21516 | | | | | | | |
| Corynebacterium | glutamicum | 21299 | | | | | | | |
| Corynebacterium | glutamicum | 21300 | | | | | | | |
| Corynebacterium | glutamicum | 39684 | | | | | | | |
| Corynebacterium | glutamicum | 21488 | | | | | | | |
| Corynebacterium | glutamicum | 21649 | | | | | | | |
| Corynebacterium | glutamicum | 21650 | | | | | | | |
| Corynebacterium | glutamicum | 19223 | | | | | | | |
| Corynebacterium | glutamicum | 13869 | | | | | | | |
| Corynebacterium | glutamicum | 21157 | | | | | | | |
| Corynebacterium | glutamicum | 21158 | | | | | | | |
| Corynebacterium | glutamicum | 21159 | | | | | | | |
| Corynebacterium | glutamicum | 21355 | | | | | | | |
| Corynebacterium | glutamicum | 31808 | | | | | | | |
| Corynebacterium | glutamicum | 21674 | | | | | | | |
| Corynebacterium | glutamicum | 21562 | | | | | | | |
| Corynebacterium | glutamicum | 21563 | | | | | | | |
| Corynebacterium | glutamicum | 21564 | | | | | | | |
| Corynebacterium | glutamicum | 21565 | | | | | | | |
| Corynebacterium | glutamicum | 21566 | | | | | | | |
| Corynebacterium | glutamicum | 21567 | | | | | | | |
| Corynebacterium | glutamicum | 21568 | | | | | | | |
| Corynebacterium | glutamicum | 21569 | | | | | | | |
| Corynebacterium | glutamicum | 21570 | | | | | | | |
| Corynebacterium | glutamicum | 21571 | | | | | | | |
| Corynebacterium | glutamicum | 21572 | | | | | | | |
| Corynebacterium | glutamicum | 21573 | | | | | | | |
| Corynebacterium | glutamicum | 21579 | | | | | | | |
| Corynebacterium | glutamicum | 19049 | | | | | | | |
| Corynebacterium | glutamicum | 19050 | | | | | | | |
| Corynebacterium | glutamicum | 19051 | | | | | | | |
| Corynebacterium | glutamicum | 19052 | | | | | | | |
| Corynebacterium | glutamicum | 19053 | | | | | | | |
| Corynebacterium | glutamicum | 19054 | | | | | | | |
| Corynebacterium | glutamicum | 19055 | | | | | | | |
| Corynebacterium | glutamicum | 19056 | | | | | | | |
| Corynebacterium | glutamicum | 19057 | | | | | | | |
| Corynebacterium | glutamicum | 19058 | | | | | | | |
| Corynebacterium | glutamicum | 19059 | | | | | | | |
| Corynebacterium | glutamicum | 19060 | | | | | | | |
| Corynebacterium | glutamicum | 19185 | | | | | | | |
| Corynebacterium | glutamicum | 13286 | | | | | | | |
| Corynebacterium | glutamicum | 21515 | | | | | | | |
| Corynebacterium | glutamicum | 21527 | | | | | | | |
| Corynebacterium | glutamicum | 21544 | | | | | | | |
| Corynebacterium | glutamicum | 21492 | | | | | | | |
| Corynebacterium | glutamicum | | | B8183 | | | | | |
| Corynebacterium | glutamicum | | | B8182 | | | | | |
| Corynebacterium | glutamicum | | | B12416 | | | | | |
| Corynebacterium | glutamicum | | | B12417 | | | | | |
| Corynebacterium | glutamicum | | | B12418 | | | | | |
| Corynebacterium | glutamicum | | | B11476 | | | | | |
| Corynebacterium | glutamicum | 21608 | | | | | | | |
| Corynebacterium | lilium | | P973 | | | | | | |
| Corynebacterium | nitrilophilus | 21419 | | | | 11594 | | | |
| Corynebacterium | spec. | | P4445 | | | | | | |
| Corynebacterium | spec. | | P4446 | | | | | | |
| Corynebacterium | spec. | 31088 | | | | | | | |
| Corynebacterium | spec. | 31089 | | | | | | | |
| Corynebacterium | spec. | 31090 | | | | | | | |
| Corynebacterium | spec. | 31090 | | | | | | | |
| Corynebacterium | spec. | 31090 | | | | | | | |
| Corynebacterium | spec. | 15954 | | | | | | | 20145 |
| Corynebacterium | spec. | 21857 | | | | | | | |
| Corynebacterium | spec. | 21862 | | | | | | | |
| Corynebacterium | spec. | 21863 | | | | | | | |

ATCC: American Type Culture Collection, Rockville, MD, USA
FERM: Fermentation Research Institute, Chiba, Japan
NRRL: ARS Culture Collection, Northern Regional Research Laboratory, Peoria, IL, USA
CECT: Coleccion Espanola de Cultivos Tipo, Valencia, Spain
NCIMB: National Collection of Industrial and Marine Bacteria Ltd., Aberdeen, UK
CBS: Centraalbureau voor Schimmelcultures, Baarn, NL
NCTC: National Collection of Type Cultures, London, UK
DSMZ: Deutsche Sammlung von Mikroorganismen und Zellkulturen, Braunschweig, Germany
For reference see Sugawara, H. et al. (1993) World directory of collections of cultures of microorganisms: Bacteria, fungi and yeasts (4^{th} edn), World federation for culture collections world data center on microorganisms, Saimata, Japen.

[0181] TABLE 4
ALIGNMENT RESULTS

| | | | | | | | % | |
|---|---|---|---|---|---|---|---|---|
| | | | | | | | homo- | |
| | length | | | | | | logy | Date of |
| ID # | (NT) | Genbank Hit | Length | Accession | Name of Genbank Hit | Source of Genbank Hit | (GAP) | Deposit |
| rxa00062 | 1521 | GB_HTG2: AC007366 | 185001 | AC007366 | Homo sapiens clone NH0501G22, *** SEQUENCING IN PROGRESS ***, 3 unordered | Homo sapiens | 39,080 | 5-Jun-99 |
| | | | | | pieces. | | | |
| rxa00084 | 948 | GB_PR3: HSU80741 | 912 | U80741 | Homo sapiens CAGH44 mRNA, partial cds. | Homo sapiens | 39,264 | 18-DEC-1997 |
| | | GB_PL1: BNDNATRNA | 1732 | X89901 | B. nigra DNA for tRNA like gene. | Brassica nigra | 36,725 | 6-Feb-97 |
| | | GB_PR3: HSU80741 | 912 | U80741 | Homo sapiens CAGH44 mRNA, partial cds. | Homo sapiens | 38,957 | 18-DEC-1997 |
| rxa00109 | 735 | GB_GSS9: AQ163721 | 388 | AQ163721 | HS_2245_A1_F07_MF CIT Approved Human Genomic Sperm Library D | Homo sapiens | 45,066 | 16-OCT-1998 |
| | | | | | Homo sapiens genomic clone Plate = 2245 Col = 13 Row = K, genomic | | | |
| | | | | | survey sequence. | | | |
| | | GB_HTG4: AC007054 | 171979 | AC007054 | Drosophila melanogaster chromosome 2 clone BACR45O18 (D527) RPCI-98 45.O.18 | Drosophila melanogaster | 36,589 | 13-OCT-1999 |
| | | | | | map 41E-41E strain y; cn bw sp, *** SEQUENCING IN PROGRESS***, 13 unordered | | | |
| | | | | | pieces. | | | |
| | | GB_HTG4: AC007054 | 171979 | AC007054 | Drosophila melanogaster chromosome 2 clone BACR45O18 (D527) RPCI-98 45.O.18 | Drosophila melanogaster | 36,589 | 13-OCT-1999 |
| | | | | | map 41E-41E strain y; cn bw sp, *** SEQUENCING IN PROGRESS***, 13 unordered | | | |
| | | | | | pieces. | | | |
| rxa00215 | 1449 | GB_BA1: SC9C7 | 31360 | AL035161 | Streptomyces coelicolor cosmid 9C7. | Streptomyces coelicolor | 44,444 | 12-Jan-99 |
| | | GB_BA1: SCE94 | 38532 | AL049628 | Streptomyces coelicolor cosmid E94. | Streptomyces coelicolor | 36,313 | 12-Apr-99 |
| | | GB_BA2: AF110185 | 20302 | AF110185 | Burkholderia pseudomallei strain 1026b DbhB (dbhB), general secretory pathway | Burkholderia | 44,159 | 2-Aug-99 |
| | | | | | protein D (gspD), general secretory pathway protein E (gspE), general secretory | pseudomallei | | |
| | | | | | pathway protein F (gspF), GspC (gspC), general secretory pathway protein G (gspG), | | | |
| | | | | | general secretory pathway protein H (gspH), general secretory pathway protein I (gspI), | | | |
| | | | | | general secretory pathway protein J (gspJ), general secretory pathway protein K (gspK), | | | |
| | | | | | general secretory pathway protein L (gspL), general secretory pathway protein M | | | |
| | | | | | (gspM), and general secretory pathway protein N (gspN) genes, complete cds; and | | | |
| | | | | | unknown genes. | | | |
| rxa00289 | 1299 | GB_EST6: N80167 | 384 | N80167 | za65g02.s1 Soares fetal liver spleen 1NFLS Homo sapiens cDNA clone IMAGE: 297458 | Homo sapiens | 40,420 | 29-MAR-1996 |
| | | | | | 3′, mRNA sequence. | | | |
| | | GB_STS: G37084 | 384 | G37084 | SHGC-56832 Human Homo sapiens STS genomic, sequence tagged site. | Homo sapiens | 40,420 | 30-MAR-1998 |
| | | GB_STS: G37084 | 384 | G37084 | SHGC-56832 Human Homo sapiens STS genomic, sequence tagged site. | Homo sapiens | 40,420 | 30-MAR-1998 |
| rxa00404 | 2439 | GB_BA1: MTCY22D7 | 31859 | Z83866 | Mycobacterium tuberculosis H37Rv complete genome; segment 133/162. | Mycobacterium | 60,271 | 17-Jun-98 |
| | | | | | | tuberculosis | | |
| | | GB_BA1: ECU82598 | 136742 | U82598 | Escherichia coli genomic sequence of minutes 9 to 12. | Escherichia coli | 54,256 | 15-Jan-97 |
| | | GB_BA2: AE000165 | 12003 | AE000165 | Escherichia coli K-12 MG1655 section 55 of 400 of the complete genome. | Escherichia coli | 54,256 | 12-Nov-98 |
| rxa00479 | 2313 | GB_BA1: SCF43A | 35437 | AL096837 | Streptomyces coelicolor cosmid F43A. | Streptomyces coelicolor | 36,245 | 13-Jul-99 |
| | | | | | | A3(2) | | |
| | | GB_GSS2: CNS015U4 | 1036 | AL105910 | Drosophila melanogaster genome survey sequence SP6 end of BAC BACN14G08 of | Drosophila melanogaster | 37,573 | 26-Jul-99 |
| | | | | | DrosBAC library from Drosophila melanogaster (fruit fly), genomic survey sequence. | | | |
| | | GB_PR3: HSA494O16 | 50502 | AL117328 | Human DNA sequence from clone 494O16 on chromosome 22, complete sequence. | Homo sapiens | 36,475 | 23-Nov-99 |
| rxa00497 | 420 | GB_BA1: MTCY78 | 33818 | Z77165 | Mycobacterium tuberculosis H37Rv complete genome; segment 145/162. | Mycobacterium | 40,250 | 17-Jun-98 |
| | | | | | | tuberculosis | | |
| | | GB_BA2: AF079544 | 817 | AF079544 | Mycobacterium avium GroESL operon, partial sequence. | Mycobacterium avium | 64,439 | 16-Aug-98 |
| | | GB_BA1: MTGROEOP | 2987 | X60350 | M. tuberculosis groE gene for KCS and 10-kDa products. | Mycobacterium | 62,857 | 23-Apr-92 |
| | | | | | | tuberculosis | | |
| rxa00575 | | | | | | | | |
| rxa00599 | 510 | GB_GSS10: AQ199703 | 439 | AQ199703 | RPCI11-46O13.TJ RPCI-11 Homo sapiens genomic clone RPCI-11-46O13, genomic | Homo sapiens | 42,657 | 20-Apr-99 |
| | | | | | survey sequence. | | | |
| | | GB_PR2: AC002127 | 144165 | AC002127 | Human BAC clone RG305H12 from 7q21, complete sequence. | Homo sapiens | 37,052 | 27-MAY-1997 |
| | | GB_STS: G51234 | 439 | G51234 | SHGC-80708 Human Homo sapiens STS genomic, sequence tagged site. | Homo sapiens | 42,657 | 25-Jun-99 |
| rxa00600 | 1221 | GB_BA1: MTCY441 | 35187 | Z80225 | Mycobacterium tuberculosis H37Rv complete genome; segment 118/162. | Mycobacterium | 56,183 | 18-Jun-98 |
| | | | | | | tuberculosis | | |
| | | GB_BA1: MSGY223 | 42061 | AD000019 | Mycobacterium tuberculosis sequence from clone y223. | Mycobacterium | 37,217 | 10-DEC-1996 |
| | | | | | | tuberculosis | | |
| | | GB_BA1: BSUB0014 | 213420 | Z99117 | Bacillus subtilis complete genome (section 14 of 21): from 2599451 to 2812870. | Bacillus subtilis | 36,553 | 26-Nov-97 |
| rxa00605 | 1603 | GB_BA2: AF069070 | 2776 | AF069070 | Endosymbiont of Onchocerca volvulus catalase gene, complete cds. | endosymbiont of | 55,396 | 25-Nov-98 |
| | | | | | | Onchocerca volvulus | | |
| | | GB_BA1: OVCAT | 1845 | X82176 | Onchocerca volvulus endobacterial mRNA for catalase. | endosymbiont of | 55,396 | 26-Nov-98 |
| | | | | | | Onchocerca volvulus | | |
| | | GB_BA1: SC2G5 | 38404 | AL035478 | Streptomyces coelicolor cosmid 2G5. | Streptomyces coelicolor | 39,530 | 11-Jun-99 |
| rxa00648 | 1533 | GB_HTG1: HS74O16 | 169401 | AL110119 | Homo sapiens chromosome 21 clone RPCIP704O1674 map 21q21, *** SEQUENCING | Homo sapiens | 36,327 | 27-Aug-99 |
| | | | | | IN PROGRESS ***, in unordered pieces. | | | |
| | | GB_HTG1: HS74O16 | 169401 | AL110119 | Homo sapiens chromosome 21 clone RPCIP704O1674 map 21q21, *** SEQUENCING | Homo sapiens | 36,327 | 27-Aug-99 |
| | | | | | IN PROGRESS ***, in unordered pieces. | | | |
| | | GB_HTG1: HS74O16 | 169401 | AL110119 | Homo sapiens chromosome 21 clone RPCIP704O1674 map 21q21, *** SEQUENCING | Homo sapiens | 35,119 | 27-Aug-99 |
| | | | | | IN PROGRESS ***, in unordered pieces. | | | |
| rxa00764 | 1239 | GB_EST36: AI898007 | 609 | AI898007 | EST267450 tomato ovary, TAMU Lycopersicon esculentum cDNA clone cLED31K22, | Lycopersicon esculentum | 34,323 | 27-Jul-99 |
| | | | | | mRNA sequence. | | | |
| | | GB_BA2: PAU93274 | 8008 | U93274 | Pseudomonas aeruginosa YafE (yafE), LeuB (leuB), Asd (asd), FimV (fimV), and HisT | Pseudomonas aeruginosa | 35,895 | 23-Jun-98 |
| | | | | | (hisT) genes, complete cds; TrpF (trpF) gene, partial cds; and unknown gene. | | | |
| | | GB_BA2: PAU93274 | 8008 | U93274 | Pseudomonas aeruginosa YafE (yafE), LeuB (leuB), Asd (asd), FimV (fimV), and HisT | Pseudomonas aeruginosa | 41,417 | 23-Jun-98 |
| | | | | | (hisT) genes, complete cds; TrpF (trpF) gene, partial cds; and unknown gene. | | | |
| rxa00803 | 1353 | GB_IN2: CELH34C03 | 27748 | AF100662 | Caenorhabditis elegans cosmid H34C03. | Caenorhabditis elegans | 34,152 | 28-OCT-1998 |
| | | GB_HTG2: AC007905 | 100722 | AC007905 | Homo sapiens chromosome 16q24.3 clone PAC 754F23, *** SEQUENCING IN | Homo sapiens | 37,472 | 24-Jun-99 |
| | | | | | PROGRESS ***, 33 unordered pieces. | | | |
| | | GB_HTG2: AC007905 | 100722 | AC007905 | Homo sapiens chromosome 16q24.3 clone PAC 754F23, *** SEQUENCING IN | Homo sapiens | 37,472 | 24-Jun-99 |
| | | | | | PROGRESS ***, 33 unordered pieces. | | | |
| rxa00810 | 324 | GB_BA1: MTY15C10 | 33050 | Z95436 | Mycobacterium tuberculosis H37Rv complete genome; segment 154/162. | Mycobacterium | 34,615 | 17-Jun-98 |
| | | | | | | tuberculosis | | |
| | | GB_BA1: MLCB2548 | 38916 | AL023093 | Mycobacterium leprae cosmid B2548. | Mycobacterium leprae | 34,615 | 27-Aug-99 |
| | | GB_BA1: ECOUW76 | 225419 | U00039 | E. coli chromosomal region from 76.0 to 81.5 minutes. | Escherichia coli | 52,997 | 7-Nov-96 |
| rxa00829 | 2463 | GB_BA1: SC5C7 | 41906 | AL031515 | Streptomyces coelicolor cosmid 5C7. | Streptomyces coelicolor | 65,269 | 7-Sep-98 |
| | | GB_BA1: SC5F2A | 40105 | AL049587 | Streptomyces coelicolor cosmid 5F2A. | Streptomyces coelicolor | 37,490 | 24-MAY-1999 |
| | | GB_BA1: STMDRRC | 3374 | L76359 | Streptomyces peucetius daunorubicin resistance protein (drrC) gene, complete cds. | Streptomyces peucetius | 55,279 | 24-DEC-1996 |
| rxa00843 | 468 | GB_BA1: MTCY9C4 | 15916 | Z77250 | Mycobacterium tuberculosis H37Rv complete genome; segment 113/162. | Mycobacterium | 40,000 | 17-Jun-98 |
| | | | | | | tuberculosis | | |
| | | GB_BA1: MTCY9C4 | 15916 | Z77250 | Mycobacterium tuberculosis H37Rv complete genome; segment 113/162. | Mycobacterium | 37,773 | 17-Jun-98 |
| | | | | | | tuberculosis | | |
| rxa00858 | 568 | GB_BA1: SCC54 | 30753 | AL035591 | Streptomyces coelicolor cosmid C54. | Streptomyces coelicolor | 39,602 | 11-Jun-99 |
| | | GB_EST18: N96610 | 547 | N96610 | 21285 Lambda-PRL1 Arabidopsis thaliana cDNA clone F10G3T7, mRNA sequence. | Arabidopsis thaliana | 37,801 | 5-Jan-98 |
| | | GB_EST18: T45493 | 436 | T45493 | 8756 Lambda-PRL2 Arabidopsis thaliana cDNA clone 133C14T7, mRNA sequence. | Arabidopsis thaliana | 34,194 | 4-Aug-98 |
| rxa00886 | 1269 | GB_BA1: SYCSLLLH | 132106 | D64006 | Synechocystis sp. PCC6803 complete genome, 25/27, 3138604-3270709. | Synechocystis sp. | 37,459 | 13-Feb-99 |
| | | GB_BA1: SCDNAJ | 5611 | X77458 | S. coelicolor dnaK, grpE and dnaJ genes. | Streptomyces coelicolor | 49.744 | 21-Nov-96 |
| | | GB_BA1: STMDNAK | 4648 | L46700 | Streptomyces coelicolor (strain A3(2)) dnaK operon encoding molecular chaperones | Streptomyces coelicolor | 49,583 | 22-Nov-96 |
| | | | | | (dnaK, dnaJ), grpE and hspR genes, complete cds's. | | | |
| rxa00900 | 975 | GB_BA2: ECOUW67_0 | 110000 | U18997 | Escherichia coli K-12 chromosomal region from 67.4 to 76.0 minutes. | Escherichia coli | 38,314 | U18997 |
| | | GB_BA2: ECOUW67_0 | 110000 | U18997 | Escherichia coli K-12 chromosomal region from 67.4 to 76.0 minutes. | Escherichia coli | 37,759 | U18997 |
| | | GB_BA2: AE000393 | 10516 | AE000393 | Escherichia coli K-12 MG1655 section 283 of 400 of the complete genome. | Escherichia coli | 38,314 | 12-Nov-98 |
| rxa00901 | 537 | GB_HTG3: AC010757 | 175571 | AC010757 | Homo sapiens chromosome 18 clone 128_C_18 map 18, *** SEQUENCING IN | Homo sapiens | 34,857 | 22-Sep-99 |
| | | | | | PROGRESS ***, 20 unordered pieces. | | | |
| | | GB_HTG3: AC010757 | 175571 | AC010757 | Homo sapiens chromosome 18 clone 128_C_18 map 18, *** SEQUENCING IN | Homo sapiens | 34,857 | 22-Sep-99 |
| | | | | | PROGRESS ***, 20 unordered pieces. | | | |
| | | GB_HTG3: AC011283 | 87295 | AC011283 | Homo sapiens clone MS2016A09, *** SEQUENCING IN PROGRESS ***, 1 unordered | Homo sapiens | 35,448 | 07-OCT-1999 |
| | | | | | pieces. | | | |
| rxa00981 | 753 | GB_OV: GGA245664 | 512 | AJ245664 | Gallus gallus partial mRNA for ATP-citrate lyase (ACL gene). | Gallus gallus | 37,538 | 28-Sep-99 |
| | | GB_PL2: AC007887 | 159434 | AC007887 | Genomic sequence for Arabidopsis thaliana BAC F15O4 from chromosome I, complete | Arabidopsis thaliana | 37,600 | 04-OCT-1999 |
| | | | | | sequence. | | | |
| | | GB_GSS1: CNS00RNW | 542 | AL087338 | Arabidopsis thaliana genome survey sequence T7 end of BAC F14D7 of IGF | Arabidopsis thaliana | 41,264 | 28-Jun-99 |
| | | | | | library from strain Columbia of Arabidopsis thaliana, genomic survey sequence. | | | |
| rxa00995 | 864 | GB_EST29: AI553951 | 450 | AI553951 | te54d01.x1 Soares_NFL_T_GBC_S1 Homo sapiens cDNA clone IMAGE: 2090497 3′ | Homo sapiens | 42,627 | 13-Apr-99 |
| | | | | | similar to gb: X02067 H. sapiens mRNA for 7SL RNA pseudogene (HUMAN);, mRNA | | | |
| | | | | | sequence. | | | |
| | | GB_PR3: AC003029 | 139166 | AC003029 | Homo sapiens Chromosome 12q24 PAC RPCI3-462E2 (Roswell Park Cancer Institute | Homo sapiens | 38,915 | 17-Sep-98 |
| | | | | | Human PAC library) complete sequence. | | | |
| | | GB_BA1: EAY14603 | 4479 | Y14603 | Erwinia amylovora srlA, srlE, srlB, srlD, srlM and srlR genes. | Erwinia amylovora | 37,694 | 6-Jan-98 |
| rxa00996 | 864 | GB_BA2: AE001001 | 10730 | AE001001 | Archaeoglobus fulgidus section 106 of 172 of the complete genome. | Archaeoglobus fulgidus | 41,078 | 15-DEC-1997 |
| | | GB_EST30: AV018764 | 242 | AV018764 | AV018764 Mus musculus 18-day embryo C57BL/6J Mus musculus cDNA clone | Mus musculus | 39,669 | 28-Aug-99 |
| | | | | | 1190006M16, mRNA sequence. | | | |
| | | GB_GSS3: B24189 | 377 | B24189 | F19E16TF IGF Arabidopsis thaliana genomic clone F19E16, genomic survey sequence. | Arabidopsis thaliana | 44,385 | 10-OCT-1997 |
| rxa01010 | 1242 | GB_OV: AF007068 | 356 | AF007068 | Coturnix coturnix arylalkylamine N-acetyltransferase mRNA, partial cds. | Coturnix coturnix | 46,629 | 12-Jul-97 |
| | | GB_EST10: AA166324 | 514 | AA166324 | ms50c09.r1 Life Tech mouse embryo 13 5dpc 10666014 Mus musculus cDNA clone | Mus musculus | 38,677 | 19-DEC-1996 |
| | | | | | IMAGE: 614992 5′ similar to SW: NEST_RAT P21263 NESTIN.;, mRNA sequence. | | | |
| | | GB_EST7: W89968 | 46 | W89968 | mf64g11.r1 Soares mouse embryo NbME13.5 14.5 Mus musculus cDNA clone | Mus musculus | 58,696 | 12-Sep-96 |
| | | | | | IMAGE: 419108 5′ similar to SW: NEST_RAT P21263 NESTIN. [1];, mRNA sequence. | | | |
| rxa01051 | 732 | GB_GSS12: AQ381423 | 579 | AQ381423 | RPCI11-135F10.TJ RPCI-11 Homo sapiens genomic clone RPCI-11-135F10, genomic | Homo sapiens | 37,651 | 21-MAY-1999 |
| | | | | | survey sequence. | | | |
| | | GB_HTG6: AC010901 | 206121 | AC010901 | Homo sapiens clone RP11-544J22, WORKING DRAFT SEQUENCE, 1 unordered | Homo sapiens | 36,011 | 04-DEC-1999 |
| | | | | | pieces. | | | |
| | | GB_GSS5: AQ746932 | 837 | AQ746932 | HS_5538_A1_A11_T7A RPCI-11 Human Male BAC Library Homo sapiens genomic | Homo sapiens | 38,640 | 19-Jul-99 |
| | | | | | clone Plate = 1114 Col = 21 Row = A, genomic survey sequence. | | | |
| rxa01052 | 432 | GB_IN1: CELC13D9 | 43487 | AF016420 | Caenorhabditis elegans cosmid C13D9. | Caenorhabditis elegans | 39,344 | 2-Aug-97 |
| | | GB_IN1: CELC13D9 | 43487 | AF016420 | Caenorhabditis elegans cosmid C13D9. | Caenorhabditis elegans | 38,780 | 2-Aug-97 |
| rxa01053 | 543 | GB_OV: CHKMAFG1 | 1316 | D28601 | Chicken novel maf-related gene mafG encoding bZip nuclear protein MafG, promoter | Gallus gallus | 39,205 | 7-Feb-99 |
| | | | | | region and exon 1. | | | |
| | | GB_HTG6: AC010765 | 146468 | AC010765 | Homo sapiens clone RP11-115N6, *** SEQUENCING IN PROGRESS ***, | Homo sapiens | 32,961 | 07-DEC-1999 |
| | | | | | 26 unordered pieces. | | | |
| | | GB_HTG6: AC010765 | 146468 | AC010765 | Homo sapiens clone RP11-115N6, *** SEQUENCING IN PROGRESS ***, 26 | Homo sapiens | 38,476 | 07-DEC-1999 |
| | | | | | unordered pieces. | | | |
| rxa01054 | 612 | GB_PL1: PHNPNGLP | 962 | D45425 | Pharbitis nil mRNA for Pharbitis nil Germin-like protein precursor, complete cds. | Ipomoea nil | 42,925 | 10-Feb-99 |
| | | GB_HTG2: HSJ402N21 | 170302 | AL049553 | Homo sapiens chromosome 6 clone RP3-402N21 map p21.1-21.31, ***SEQUENCING | Homo sapiens | 36,825 | 03-DEC-1999 |
| | | | | | IN PROGRESS ***, in unordered pieces. | | | |
| | | GB_HTG2: HSJ402N21 | 170302 | AL049553 | Homo sapiens chromosome 6 clone RP3-402N21 map p21.1-21.31, ***SEQUENCING | Homo sapiens | 36,825 | 03-DEC-1999 |
| | | | | | IN PROGRESS ***, in unordered pieces. | | | |
| rxa01217 | 723 | GB_IN2: CELF18A12 | 29784 | AF016688 | Caenorhabditis elegans cosmid F18A12. | Caenorhabditis elegans | 35,794 | 08-OCT-1999 |
| | | GB_IN2: CELF18A12 | 29784 | AF016688 | Caenorhabditis elegans cosmid F18A12. | Caenorhabditis elegans | 40,625 | 08-OCT-1999 |
| | | GB_RO: MUSMCFTR | 6304 | M60493 | Mouse cystic fibrosis transmembrane conductance regulator (CFTR) mRNA, complete | Mus musculus | 37,793 | 10-Jun-94 |
| | | | | | cds. | | | |
| rxa01320 | 1770 | GB_BA2: AF031037 | 1472 | AF031037 | Neisseria meningitidis chloramphenicol acetyltransferase gene, complete cds. | Neisseria meningitidis | 35,014 | 21-Apr-98 |
| | | GB_HTG1: PFMAL13PA | 80518 | AL109815 | Plasmodium falciparum chromosome 13 strain 3D7, *** SEQUENCING IN PROGRESS | Plasmodium falciparum | 17,697 | 19-Aug-99 |
| | | | | | ***, in unordered pieces. | | | |
| | | GB_HTG1: PFMAL13PA | 80518 | AL109815 | Plasmodium falciparum chromosome 13 strain 3D7, *** SEQUENCING IN PROGRESS | Plasmodium falciparum | 17,697 | 19-Aug-99 |
| | | | | | ***, in unordered pieces. | | | |
| rxa01345 | 1575 | GB_PR3: AC005224 | 166687 | AC005224 | Homo sapiens chromosome 17, clone hRPK.214_O_1, complete sequence. | Homo sapiens | 38,195 | 14-Aug-98 |
| | | GB_PR3: AC005224 | 166687 | AC005224 | Homo sapiens chromosome 17, clone hRPK.214_O_1, complete sequence. | Homo sapiens | 36,611 | 14-Aug-98 |
| | | GB_HTG3: AC011500_1 | 300851 | AC011500 | Homo sapiens chromosome 19 clone CIT978SKB_60E11, *** SEQUENCING IN | Homo sapiens | 36,446 | AC011500 |
| | | | | | PROGRESS ***, 246 unordered pieces. | | | |
| rxa01407 | 1014 | GB_HTG3: AC010831 | 70233 | AC010831 | Homo sapiens clone 6_L_24, LOW-PASS SEQUENCE SAMPLING. | Homo sapiens | 35,764 | 23-Sep-99 |
| | | GB_HTG3: AC010831 | 70233 | AC010831 | Homo sapiens clone 6_L_24, LOW-PASS SEQUENCE SAMPLING. | Homo sapiens | 35,764 | 23-Sep-99 |
| | | GB_PR3: AC004058 | 38400 | AC004058 | Homo sapiens chromosome 4 clone B241P19 map 4q25, complete sequence. | Homo sapiens | 40,778 | 30-Sep-98 |
| rxa01408 | 324 | GB_PR4: AF152365 | 246546 | AF152365 | Homo sapiens constitutive fragile region FRA3B sequence. | Homo sapiens | 41,234 | 1-Aug-99 |
| | | GB_HTG3: AC007890 | 121256 | AC007890 | Drosophila melanogaster chromosome 3 clone BACR02G21 (D722) RPCI-98 02.G.21 | Drosophila melanogaster | 39,432 | 3-Sep-99 |
| | | | | | map 90E-91A strain y; cn bw sp, *** SEQUENCING IN PROGRESS***, 89 unordered | | | |
| | | | | | pieces. | | | |
| | | GB_HTG3: AC007890 | 121256 | AC007890 | Drosophila melanogaster chromosome 3 clone BACR02G21 (D722) RPCI-98 02.G.21 | Drosophila melanogaster | 39,432 | 3-Sep-99 |
| | | | | | map 90E-91A strain y; cn bw sp, *** SEQUENCING IN PROGRESS***, 89 unordered | | | |
| | | | | | pieces. | | | |
| rxa01524 | 1566 | GB_BA1: BSUB0015 | 218410 | Z99118 | Bacillus subtilis complete genome (section 15 of 21): from 2795131 to 3013540. | Bacillus subtilis | 38,201 | 26-Nov-97 |
| | | GB_HTG2: AC008260 | 107439 | AC008260 | Drosophila melanogaster chromosome 2 clone BACR13J10 (D924) RPCI-98 13.J.10 | Drosophila melanogaster | 38,302 | 2-Aug-99 |
| | | | | | map 47B-47C strain y; cn bw sp, *** SEQUENCING IN PROGRESS***, 82 unordered | | | |
| | | | | | pieces. | | | |
| | | GB_HTG2: AC008260 | 107439 | AC008260 | Drosophila melanogaster chromosome 2 clone BACR13J10 (D924) RPCI-98 13.J.10 | Drosophila melanogaster | 38,302 | 2-Aug-99 |
| | | | | | map 47B-47C strain y; cn bw sp, *** SEQUENCING IN PROGRESS ***, 82 unordered | | | |
| | | | | | pieces. | | | |
| rxa01578 | 1510 | GB_PR4: AF111170 | 148083 | AF111170 | Homo sapiens 14q32 Jagged2 gene, complete cds; and unknown gene. | Homo sapiens | 37,873 | 14-Jul-99 |
| | | GB_PR4: AF111170 | 148083 | AF111170 | Homo sapiens 14q32 Jagged2 gene, complete cds; and unknown gene. | Homo sapiens | 40,220 | 14-Jul-99 |
| | | GB_BA1: AEY13732 | 6740 | Y13732 | Alcaligenes eutrophus genes for ureases, ureD1, ureD2, ureA, ureB, and ORF1, ORF2. | Ralstonia eutropha | 42,960 | 23-Sep-97 |
| rxa01616 | 1605 | GB_BA2: AF088857 | 2908 | AF088857 | Vogesella indigofera indigoidine biosynthesis regulatory locus, complete sequence. | Vogesella indigofera | 37,626 | 10-Sep-99 |
| | | GB_IN1: CEM04D8 | 21552 | Z32682 | Caenorhabditis elegans cosmid M04D8, complete sequence. | Caenorhabditis elegans | 37,237 | 23-Nov-98 |
| | | GB_EST25: AI281910 | 276 | AI281910 | qt82d04.x1 NCI_CGAP_Co14 Homo sapiens cDNA clone IMAGE: 1961767 3′, mRNA | Homo sapiens | 38,406 | 21-DEC-1998 |
| | | | | | sequence. | | | |
| rxa01666 | 1500 | GB_BA1: CGU43535 | 2531 | U43535 | Corynebacterium glutamicum multidrug resistance protein (cmr) gene, complete cds. | Corynebacterium | 99,933 | 9-Apr-97 |
| | | | | | | glutamicum | | |
| | | GB_HTG3: AC009213 | 114735 | AC009213 | Drosophila melanogaster chromosome 3 clone BACR09F18 (D812) RPCI-98 09.F.18 | Drosophila melanogaster | 36,111 | 23-Aug-99 |
| | | | | | map 98D-98D strain y; cn bw sp, *** SEQUENCING IN PROGRESS ***, | | | |
| | | | | | 109 unordered | | | |
| | | | | | pieces. | | | |
| | | GB_HTG3: AC009213 | 114735 | AC009213 | Drosophila melanogaster chromosome 3 clone BACR09F18 (D812) RPCI-98 09.F.18 | Drosophila melanogaster | 36,111 | 23-Aug-99 |
| | | | | | map 98D-98D strain y; cn bw sp, *** SEQUENCING IN PROGRESS***, 109 | | | |
| | | | | | unordered pieces. | | | |
| rxa01674 | 1017 | GB_PL1: AB017159 | 1859 | AB017159 | Daucus carota mRNA for citrate synthase, complete cds. | Daucus carota | 39,537 | 01-MAY-1999 |
| | | GB_PR1: HUMGNOS48 | 23142 | D26607 | Homo sapiens endothelial nitric oxide synthase gene, complete cds. | Homo sapiens | 36,419 | 13-Jul-99 |
| | | GB_HTG3: AC011234 | 154754 | AC011234 | Homo sapiens clone NH0166D23, *** SEQUENCING IN PROGRESS ***, 7 unordered | Homo sapiens | 36,317 | 04-OCT-1999 |
| | | | | | pieces. | | | |
| rxa01873 | 1359 | GB_HTG3: AC009450 | 124337 | AC009450 | Homo sapiens chromosome 9 clone 30_C_23 map 9, *** SEQUENCING IN | Homo sapiens | 35,303 | 22-Aug-99 |
| | | | | | PROGRESS ***, 20 unordered pieces. | | | |
| | | GB_HTG3: AC009450 | 124337 | AC009450 | Homo sapiens chromosome 9 clone 30_C_23 map 9, *** SEQUENCING IN | Homo sapiens | 35,303 | 22-Aug-99 |
| | | | | | PROGRESS ***, 20 unordered pieces. | | | |
| | | GB_HTG3: AC009919 | 134724 | AC009919 | Homo sapiens clone 115_I_23, LOW-PASS SEQUENCE SAMPLING. | Homo sapiens | 35,409 | 8-Sep-99 |
| rxa01922 | 1275 | GB_BA1: ECONEUC | 1676 | M84026 | E. coli protein p7 (neu C) gene, complete cds. | Escherichia coli | 35,189 | 26-Apr-93 |
| | | GB_HTG2: AC007853 | 116280 | AC007853 | Drosophila melanogaster chromosome 3 clone BACR03L02 (D766) RPCI-98 03.L.2 | Drosophila melanogaster | 34,365 | 2-Aug-99 |
| | | | | | map 96B-96C strain y; cn bw sp, *** SEQUENCING IN PROGRESS ***, 80 unordered | | | |
| | | | | | pieces. | | | |
| | | GB_HTG2: AC007853 | 116280 | AC007853 | Drosophila melanogaster chromosome 3 clone BACR03L02 (D766) RPCI-98 03.L.2 | Drosophila melanogaster | 34,365 | 2-Aug-99 |
| | | | | | map 96B-96C strain y; cn bw sp, *** SEQUENCING IN PROGRESS***, 80 unordered | | | |
| | | | | | pieces. | | | |
| rxa01936 | 1395 | GB_HTG4: AC010037 | 166249 | AC010037 | Drosophila melanogaster chromosome 3L/66B6 clone RPCI98-6E4, *** SEQUENCING | Drosophila melanogaster | 38,534 | 16-OCT-1999 |
| | | | | | IN PROGRESS ***, 52 unordered pieces. | | | |
| | | GB_HTG4: AC010037 | 166249 | AC010037 | Drosophila melanogaster chromosome 3L/66B6 clone RPCI98-6E4, *** SEQUENCING | Drosophila melanogaster | 38,534 | 16-OCT-1999 |
| | | | | | IN PROGRESS ***, 52 unordered pieces. | | | |
| | | GB_PR4: AC005552 | 167228 | AC005552 | Homo sapiens chromosome 17, clone hRPK.212_E_8, complete sequence. | Homo sapiens | 36,249 | 26-Nov-98 |
| rxa01984 | 420 | GB_PR1: HS169C8F | 245 | Z57239 | H. sapiens CpG island DNA genomic Mse1 fragment, clone 169c8, forward read | Homo sapiens | 45,679 | 18-OCT-1995 |
| | | | | | cpg169c8.ft1a. | | | |
| | | GB_BA1: SERATTBXIS | 3255 | L11597 | Saccharopolyspora erythraea excisionase (xis) gene, integrase (int) gene, complete | Saccharopolyspora | 36,232 | 6-Jul-94 |
| | | | | | cds's and attB site. | erythraea | | |
| | | GB_EST7: W97557 | 267 | W97557 | mf98a09.r1 Soares mouse embryo NbME13.5 14.5 Mus musculus cDNA clone | Mus musculus | 42,969 | 16-Jul-96 |
| | | | | | IMAGE: 422296 5′, mRNA sequence. | | | |
| rxa02060 | | | | | | | | |
| rxa02087 | 1470 | GB_PR3: AC005544 | 169045 | AC005544 | Homo sapiens chromosome 17, clone hRPK.349_A_8, complete sequence. | Homo sapiens | 35,724 | 25-Sep-98 |
| | | GB_PL1: ATF20B18 | 104738 | AL049483 | Arabidopsis thaliana DNA chromosome 4, BAC clone F20B18 (ESSA project). | Arabidopsis thaliana | 35,890 | 24-MAR-1999 |
| | | GB_PL2: ATT25K17 | 89904 | AL049171 | Arabidopsis thaliana DNA chromosome 4, BAC clone (ESSA project). | Arabidopsis thaliana | 38,128 | 27-Aug-99 |
| rxa02088 | 1338 | GB_HTG3: AC008697 | 167932 | AC008697 | Homo sapiens chromosome 5 clone CIT978SKB_70D3, *** SEQUENCING IN | Homo sapiens | 36,662 | 3-Aug-99 |
| | | | | | PROGRESS ***, 54 unordered pieces. | | | |
| | | GB_HTG3: AC008697 | 167932 | AC008697 | Homo sapiens chromosome 5 clone CIT978SKB_70D3, *** SEQUENCING IN | Homo sapiens | 36,662 | 3-Aug-99 |
| | | | | | PROGRESS ***, 54 unordered pieces. | | | |
| | | GB_HTG3: AC008703 | 213971 | AC008703 | Homo sapiens chromosome 5 clone CIT978SKB_76P12, *** SEQUENCING IN | Homo sapiens | 34,768 | 3-Aug-99 |
| | | | | | PROGRESS ***, 54 unordered pieces. | | | |
| rxa02159 | 636 | GB_BA2: AF049897 | 9196 | AF049897 | Corynebacterium glutamicum N-acetylglutamylphosphate reductase (argC), ornithine | Corynebacterium | 99,843 | 1-Jul-98 |
| | | | | | acetyltransferase (argJ), N-acetylglutamate kinase (argB), acetylornithine transaminase | glutamicum | | |
| | | | | | (argD), ornithine carbamoyltransferase (argF), arginine repressor (argR), | | | |
| | | | | | argininosuccinate synthase (argG), and argininosuccinate lyase (argH) genes, complete | | | |
| | | | | | cds. | | | |
| | | GB_BA2: AF031518 | 2045 | AF031518 | Corynebacterium glutamicum ornithine carbamolytransferase (argF) gene, complete cds. | Corynebacterium | 88,679 | 5-Jan-99 |
| | | | | | | glutamicum | | |
| | | GB_BA2: AF041436 | 516 | AF041436 | Corynebacterium glutamicum arginine repressor (argR) gene, complete cds. | Corynebacterium | 100,000 | 5-Jan-99 |
| | | | | | | glutamicum | | |
| rxa02184 | 504 | GB_BA1: BSZ92953 | 8164 | Z92953 | B. subtilis yws[A, B, C] genes and rbs[A, C, D, K, R] genes. | Bacillus subtilis | 38,951 | 24-Jun-98 |
| | | GB_EST36: AI878071 | 593 | AI878071 | fc57a12.y1 Zebrafish WashU MPIMG EST Danio rerio cDNA 5′ similar to TR: Q13151 | Danio rerio | 36,774 | 21-Jul-99 |
| | | | | | Q13151 HETEROGENEOUS NUCLEAR RIBONUCLEOPROTEIN A0;, mRNA | | | |
| | | | | | sequence. | | | |
| | | GB_EST37: AI958166 | 641 | AI958166 | fc91f01.y1 Zebrafish WashU MPIMG EST Danio rerio cDNA 5′ similar to TR: Q13151 | Danio rerio | 36,774 | 20-Aug-99 |
| | | | | | Q13151 HETEROGENEOUS NUCLEAR RIBONUCLEOPROTEIN A0;, mRNA | | | |
| | | | | | sequence. | | | |
| rxa02200 | 1233 | GB_PR3: HSA494O16 | 50502 | AL117328 | Human DNA sequence from clone 494O16 on chromosome 22, complete sequence. | Homo sapiens | 38,648 | 23-Nov-99 |
| | | GB_HTG2: AC008161 | 158440 | AC008161 | Mus musculus clone 182_H_5, *** SEQUENCING IN PROGRESS ***, 29 unordered | Mus musculus | 35,938 | 28-Jul-99 |
| | | | | | pieces. | | | |
| | | GB_HTG2: AC008161 | 158440 | AC008161 | Mus musculus clone 182_H_5, *** SEQUENCING IN PROGRESS ***, 29 unordered | Mus musculus | 35,938 | 28-Jul-99 |
| | | | | | pieces. | | | |
| rxa02201 | 486 | GB_EST4: H16949 | 465 | H16949 | ym34a11.r1 Soares infant brain 1NIB Homo sapiens cDNA clone IMAGE: 50010 5′, | Homo sapiens | 38,267 | 29-Jun-95 |
| | | | | | mRNA sequence. | | | |
| | | GB_EST4: H16949 | 465 | H16949 | ym34a11.r1 Soares infant brain 1NIB Homo sapiens cDNA clone IMAGE: 50010 5′, | Homo sapiens | 36,552 | 29-Jun-95 |
| | | | | | mRNA sequence. | | | |
| rxa02202 | 762 | GB_IN1: CELC41A3 | 37149 | U41541 | Caenorhabditis elegans cosmid C41A3. | Caenorhabditis elegans | 41,678 | 08-DEC-1995 |
| | | GB_EST33: AV080151 | 236 | AV080151 | AV080151 Mus musculus stomach C57BL/6J adult Mus musculus cDNA clone | Mus musculus | 43,348 | 25-Jun-99 |
| | | | | | 2210413B04, mRNA sequence. | | | |
| | | GB_GSS5: AQ766877 | 545 | AQ766877 | HS_2017_B2_B08_MR CIT Approved Human Genomic Sperm Library D | Homo sapiens | 35,568 | 28-Jul-99 |
| | | | | | Homo sapiens genomic clone Plate = 2017 Col = 16 Row = D, genomic survey | | | |
| | | | | | | sequence. | | |
| rxa02205 | 1002 | GB_HTG2: AC005959 | 127587 | AC005959 | Homo sapiens, *** SEQUENCING IN PROGRESS ***, 2 ordered pieces. | Homo sapiens | 40,310 | 11-Nov-98 |
| | | GB_HTG2: AC005959 | 127587 | AC005959 | Homo sapiens, *** SEQUENCING IN PROGRESS ***, 2 ordered pieces. | Homo sapiens | 40,310 | 11-Nov-98 |
| | | GB_IN1: BRPTUBBA | 4571 | M36380 | B. pahangi beta-tubulin gene, complete cds. | Brugla pahangi | 37.703 | 26-Apr-93 |
| rxa02305 | 975 | GB_RO: MUSPAFR | 1140 | D50872 | Mouse gene for platelet activating factor receptor, complete cds. | Mus musculus | 38,420 | 10-Feb-99 |
| | | GB_PR3: HUMARL1A | 1008 | L28997 | Homo sapiens ARL1 mRNA, complete cds. | Homo sapiens | 42.188 | 13-Jan-95 |
| | | GB_BA1: MLCB2533 | 40245 | AL035310 | Mycobacterium leprae cosmid B2533. | Mycobacterium leprae | 42 | 27-Aug-99 |
| rxa02431 | 899 | GB_EST4: H35255 | 407 | H35255 | EST111890 Rat PC-12 cells, NGF-treated (9 days) Rattus sp. cDNA clone RPNCO03, | Rattus sp. | 39,098 | 2-Apr-98 |
| | | | | | mRNA sequence. | | | |
| | | GB_HTG1: HS791K14 | 155318 | AL035685 | Homo sapiens chromosome 20 clone RP4-791K14, *** SEQUENCING IN PROGRESS | Homo sapiens | 39,456 | 23-Nov-99 |
| | | | | | ***, in unordered pieces. | | | |
| | | GB_HTG1: HS791K14 | 155318 | AL035685 | Homo sapiens chromosome 20 clone RP4-791K14, *** SEQUENCING IN PROGRESS | Homo sapiens | 39,456 | 23-Nov-99 |
| | | | | | ***, in unordered pieces. | | | |
| rxa02446 | 558 | GB_BA2: AF036166 | 895 | AF036166 | Xanthomonas campestris organic hydroperoxide resistance protein (ohr) gene, complete | Xanthomonas campestris | 49.369 | 19-MAY-1998 |
| | | | | | cds. | | | |
| | | GB_EST5: N25122 | 620 | N25122 | yx19d10.r1 Soares melanocyte 2NbHM Homo sapiens cDNA clone IMAGE: 262195 5′, | Homo sapiens | 35,417 | 28-DEC-1995 |
| | | | | | mRNA sequence. | | | |
| | | GB_EST5: N25122 | 620 | N25122 | yx19d10.r1 Soares melanocyte 2NbHM Homo sapiens cDNA clone IMAGE: 262195 5′, | Homo sapiens | 37,172 | 28-DEC-1995 |
| | | | | | mRNA sequence. | | | |
| rxa02541 | 1308 | GB_BA2: DPU93358 | 1267 | U93358 | Deinococcus proteolyticus 40 kDa heat shock chaperone protein (dnaJ) gene, complete | Deinococcus | 42,115 | 17-Jan-98 |
| | | | | | cds. | proteolyticus | | |
| | | GB_EST30: AI658096 | 343 | AI658096 | fc14c09.y1 Zebrafish WashU MPIMG EST Danio rerio cDNA 5′ similar to | Danio rerio | 52,059 | 06-MAY-1999 |
| | | | | | SW: DNJ2_HUMAN P31689 DNAJ PROTEIN HOMOLOG 2.;, mRNA sequence. | | | |
| | | GB_EST37: AI959242 | 545 | AI959242 | fd25h11.y1 Zebrafish WashU MPIMG EST Danio rerio cDNA 5′ similar to | Danio rerio | 45,438 | 20-Aug-99 |
| | | | | | SW: DNJ2_HUMAN P31689 DNAJ PROTEIN HOMOLOG 2.;, mRNA sequence. | | | |
| rxa02542 | 777 | EM_PAT: E10832 | 1856 | E10832 | DNA encoding Dnak protein which is one of heat shock protein from | Corynebacterium | 99,000 | 08-OCT-1997 |
| | | | | | | glutamicum | | (Rel. 52, |
| | | | | | | | | Created) |
| | | GB_EST24: Z82017 | 396 | Z82017 | SSZ82017 Porcine small intestine cDNA library Sus scrofa cDNA clone c12c06 | Sus scrofa | 37,067 | 30-Apr-99 |
| | | | | | 5′ similar to eukaryotic initiation factor 4 gamma, mRNA sequence. | | | |
| | | GB_OM: CATERYTHRO | 681 | L10606 | Cat erythropoietin mRNA, 3′ end. | Felis catus | 39,409 | 14-OCT-1993 |
| rxa02543 | 1977 | EM_PAT: E10832 | 1856 | E10832 | DNA encoding Dnak protein which is one of heat shock protein from | Corynebacterium | 97,306 | 08-OCT-1997 |
| | | | | | | glutamicum | | (Rel. 52, |
| | | | | | | | | Created) |
| | | GB_BA1: MPHSP70 | 2179 | X59437 | M. paratuberculosis gene for 70 kD heat shock protein. | Mycobacterium avium | 73,404 | 23-Apr-92 |
| | | | | | | subsp. paratuberculosis | | |
| | | GB_BA1: MTY13E10 | 35019 | Z95324 | Mycobacterium tuberculosis H37Rv complete genome; segment 18/162. | Mycobacterium | 72,028 | 17-Jun-98 |
| | | | | | | tuberculosis | | |
| rxa02586 | 393 | GB_IN2: AC006472 | 156362 | AC006472 | Drosophila melanogaster, chromosome 2R, region 45E1-46A2, BAC clone | Drosophila melanogaster | 37,958 | 30-Jan-99 |
| | | | | | BACR48G21, complete sequence. | | | |
| | | GB_HTG4: AC010020 | 106541 | AC010020 | Drosophila melanogaster chromosome 3L/66D10 clone RPCI98-26I3, *** | Drosophila melanogaster | 37,333 | 16-OCT-1999 |
| | | | | | SEQUENCING IN PROGRESS ***, 55 unordered pieces. | | | |
| | | GB_HTG4: AC010020 | 106541 | AC010020 | Drosophila melanogaster chromosome 3L/66D10 clone RPCI98-26I3, *** | Drosophila melanogaster | 37,333 | 16-OCT-1999 |
| | | | | | SEQUENCING IN PROGRESS ***, 55 unordered pieces. | | | |
| rxa02587 | 2214 | GB_BA1: MLCL622 | 42498 | Z95398 | Mycobacterium leprae cosmid L622. | Mycobacterium leprae | 39,848 | 24-Jun-97 |
| | | GB_RO: AF074879 | 3316 | AF074879 | Rattus norvegicus testis-specific protein TSPY gene, complete cds. | Rattus norvegicus | 35,830 | 6-Jul-99 |
| | | GB_RO: RNJ001380 | 2641 | AJ001380 | Rattus norvegicus Tspy partial genomic sequence, exons 1-6. | Rattus norvegicus | 37,702 | 29-Jun-98 |
| rxs03217 | 331 | GB_BA1: MLCB2548 | 38916 | AL023093 | Mycobacterium leprae cosmid B2548. | Mycobacterium leprae | 37,888 | 27-Aug-99 |
| | | GB_HTG2: HSJ662M14 | 174772 | AL079336 | Homo sapiens chromosome 20 clone RP4-662M14, *** SEQUENCING IN PROGRESS | Homo sapiens | 36,420 | 4-Feb-00 |
| | | | | | ***, 10 unordered pieces. | | | |
| | | GB_HTG2: HSJ662M14 | 174772 | AL079336 | Homo sapiens chromosome 20 clone RP4-662M14, *** SEQUENCING IN PROGRESS | Homo sapiens | 35,962 | 4-Feb-00 |
| | | | | | ***, 10 unordered pieces. | | | |

What is claimed:

1. An isolated nucleic acid molecule selected from the group consisting of
a) an isolated nucleic acid molecule comprising the nucleotide sequence of SEQ ID NO:79, or a complement thereof;
b) an isolated nucleic acid molecule which encodes a polypeptide comprising the amino acid sequence of SEQ ID NO:80, or a complement thereof;
c) an isolated nucleic acid molecule which encodes a naturally occurring allelic variant of a polypeptide comprising the amino acid sequence of SEQ ID NO:80, or a complement thereof;
d) an isolated nucleic acid molecule comprising a nucleotide sequence which is at least 50% identical to the entire nucleotide sequence of SEQ ID NO:79, or a complement thereof; and
e) an isolated nucleic acid molecule comprising a fragment of at least 15 contiguous nucleotides of the nucleotide sequence of SEQ ID NO:79, or a complement thereof.

2. An isolated nucleic acid molecule comprising the nucleic acid molecule of claim 1 and a nucleotide sequence encoding a heterologous polypeptide.

3. A vector comprising the nucleic acid molecule of claim 1.

4. The vector of claim 3, which is an expression vector.

5. A host cell transfected with the expression vector of claim 4.

6. The host cell of claim 5, wherein said cell is a microorganism.

7. The host cell of claim 6, wherein said cell belongs to the genus Corynebacterium or Brevibacterium.

8. A method of producing a polypeptide comprising culturing the host cell of claim 5 in an appropriate culture medium to, thereby, produce the polypeptide.

9. A method for producing a fine chemical, comprising culturing the cell of claim 5 such that the fine chemical is produced.

10. The method of claim 9, wherein said method further comprises the step of recovering the fine chemical from said culture.

11. The method of claim 9, wherein said cell belongs to the genus Corynebacterium or Brevibacterium.

12. The method of claim 9, wherein said cell is selected from the group consisting of Corynebacterium glutamicum, Corynebacterium herculis, Corynebacterium, lilium, Corynebacterium acetoacidophilum, Corynebacterium acetoglutamicum, Corynebacterium acetophilum, Corynebacterium ammoniagenes, Corynebacterium fujiokense, Corynebacterium nitrilophilus, Brevibacterium ammoniagenes, Brevibacterium butanicum, Brevibacterium divaricatum, Brevibacterium flavum, Brevibacterium healii, Brevibacterium ketoglutamicum, Brevibacterium ketosoreductum, Brevibacterium lactofermentum, Brevibacterium linens, Brevibacterium paraffinolyticum, and those strains set forth in Table 3.

13. The method of claim 9, wherein expression of the nucleic acid molecule from said vector results in modulation of production of said fine chemical.

14. The method of claim 9, wherein said fine chemical is selected from the group consisting of organic acids, proteinogenic and nonproteinogenic amino acids, purine and pyrimidine bases, nucleosides, nucleotides, lipids, saturated and unsaturated fatty acids, diols, carbohydrates, aromatic compounds, vitamins, cofactors, polyketides, and enzymes.

15. The method of claim 9, wherein said fine chemical is an amino acid selected from the group consisting of lysine, glutamate, glutamine, alanine, aspartate, glycine, serine, threonine, methionine, cysteine, valine, leucine, isoleucine, arginine, proline, histidine, tyrosine, phenylalanine, and tryptophan.

16. An isolated polypeptide selected from the group consisting of
a) an isolated polypeptide comprising the amino acid sequence of SEQ ID NO:80;
b) an isolated polypeptide comprising a naturally occurring allelic variant of a polypeptide comprising the amino acid sequence of SEQ ID NO:80;
c) an isolated polypeptide which is encoded by a nucleic acid molecule comprising the nucleotide sequence of SEQ ID NO:79;
d) an isolated polypeptide which is encoded by a nucleic acid molecule comprising a nucleotide sequence which is at least 50% identical to the entire nucleotide sequence of SEQ ID NO:79;
e) an isolated polypeptide comprising an amino acid sequence which is at least 50% identical to the entire amino acid sequence of SEQ ID NO:80; and
f) an isolated polypeptide comprising a fragment of a polypeptide comprising the amino acid sequence of SEQ ID NO:80, wherein said polypeptide fragment maintains a biological activity of the polypeptide comprising the amino sequence.

17. The isolated polypeptide of claim 16, further comprising heterologous amino acid sequences.

18. A method for diagnosing the presence or activity of Corynebacterium diphtheriae in a subject, comprising detecting the presence of at least one of the nucleic acid molecules of claim 1, thereby diagnosing the presence or activity of Corynebacterium diphtheriae in the subject.

19. A method for diagnosing the presence or activity of Corynebacterium diphtheriae in a subject, comprising detecting the presence of at least one of the polypeptide molecules of claim 16, thereby diagnosing the presence or activity of Corynebacterium diphtheriae in the subject.

20. A host cell comprising a nucleic acid molecule selected from the group consisting of
a) the nucleic acid molecule of SEQ ID NO:79, wherein the nucleic acid molecule is disrupted by at least one technique selected from the group consisting of a point mutation, a truncation, an inversion, a deletion, an addition, a substitution and homologous recombination;
b) the nucleic acid molecule of SEQ ID NO:79, wherein the nucleic acid molecule comprises one or more nucleic acid modifications as compared to the sequence of SEQ ID NO:79, wherein the modification is selected from the group consisting of a point mutation, a truncation, an inversion, a deletion, an addition and a substitution; and
c) the nucleic acid molecule of SEQ ID NO:79, wherein the regulatory region of the nucleic acid molecule is modified relative to the wild-type regulatory region of the molecule by at least one technique selected from the group consisting of a point mutation, a truncation, an inversion, a deletion, an addition, a substitution and homologous recombination.

The application's sequence listing, which the Patent Office published only in electronic form, follows.

SEQUENCE LISTING (306 sequences)

SEQ ID NO: 1 - DNA, 1566 bp, Corynebacterium glutamicum
  CDS (101)..(1543): RXA01524
ttgtggcactctttagtagttttttctcatagctcagtttcgcaactttagagaactctagaaactgagcttcatgctgtgaaaggccttttctccattcatggattcccaaattaatactcagacctctccggcagctgcgaagctgcctagggaggtcgttgttgttctttcgatcctcgtggtttccgcgatgatcatgattcttaatgaaaccattctgtcggttgcgttgccttccatcatggaagatttctccgtgcctgaaactactgcacagtggttgaccactggctttatgttgacgatggcagtggtgattccaactactggttatctgcttgatcgtttttccactaagacgatctttgttactgcgttgttgttctttacggttggtacgttgactgcggcgttggctccaacgtttgcggtgctgcttggtgctcgtatcgttcaggcggttggtactgcgctggtgatgcctttgctgatgacggttacgttgacggtggttcctgcggagcgtcgtggttcgatgatgggcattatttccatcgtgatttctgttgcgccggcgcttggtcctacgttgtctggtgtcattcttaactctttgacctggcactggttgttttggatgatgcttccgatcgttgttatcgctttggtaattggtttcttcttgatcaaaaatatcggcgaaaccaagatcaccccactggatgttctgtctgtcatcctttcggtgtttgccttcggtggtttggtgtacggcttcagttccttcggagcaatcctggagggcgaaggcaccgtaggtatcttcgcgatcgtcgttggcgccatcgcactcctcatctttgctttgcgacagcaccaactcggcaagcaagacaaagcactgatggatctccgagccttcaaggtgaggaacttcagcttctccttgaccaccatccttttggcgttcggcgcgatgctcggaaccgtcatggttttgccaatctacctgcagacttccctcggagttactgctttggtgaccggtttggttgttatgcccggcggcctcctccagggtctgatcagcccattcatcggacgtttctacgacaaggtcggtccacgtccgctgctgattcccggagcaattgcgctggctatcgcggcatcctcgatgacttttctcaatgagaattcacccgtgtggatggtcgtggtcatgcacgttgtgttcagcatcggcatgtgtttgatgatgacccctctcatgaccaccgctctcggcgcccttccgaagcacctctatggtcacggctccgcaattttgaacacgttccaacagctcgcaggcgcagccggaacagcgatcatgattgcagcactttccttcggcacttccattgcagcgtcttcgggatctgcgcatgctgaagctgttgccgctggtaccaaggttgcgttcatcgcaggcgcaatcatcgcggtgatcgctttggttgtttccctcttcgtcactcgcgtcgaggaagaagctcactaaataccaaaaaatggggcaga

SEQ ID NO: 2 - protein, 481 aa, Corynebacterium glutamicum
MDSQINTQTSPAAAKLPREVVVVLSILVVSAMIMILNETILSVALPSIMEDFSVPETTAQWLTTGFMLTMAVVIPTTGYLLDRFSTKTIFVTALLFFTVGTLTAALAPTFAVLLGARIVQAVGTALVMPLLMTVTLTVVPAERRGSMMGIISIVISVAPALGPTLSGVILNSLTWHWLFWMMLPIVVIALVIGFFLIKNIGETKITPLDVLSVILSVFAFGGLVYGFSSFGAILEGEGTVGIFAIVVGAIALLIFALRQHQLGKQDKALMDLRAFKVRNFSFSLTTILLAFGAMLGTVMVLPIYLQTSLGVTALVTGLVVMPGGLLQGLISPFIGRFYDKVGPRPLLIPGAIALAIAASSMTFLNENSPVWMVVVMHVVFSIGMCLMMTPLMTTALGALPKHLYGHGSAILNTFQQLAGAAGTAIMIAALSFGTSIAASSGSAHAEAVAAGTKVAFIAGAIIAVIALVVSLFVTRVEEEAH

SEQ ID NO: 3 - DNA, 371 bp, Corynebacterium glutamicum
  CDS (52)..(348): RXA00497
tggaaacccacaaccggcacacacaaaatttttctcatggagggattcaccgtggcaaacgtcaacatcaagccgcttgaggacaagatcctcgttcagatcaacgaagcagagaccaccaccgcttccggcctggtcattccagattccgctaaggaaaagccacaagaggcaaccgttatcgcagttggcccaggccgcttcgatgacaagggtaaccgcatcccactggacatcaaggaagatgacgttgtgatcttctcccgttacggcggcaccgagatcaagttcggtggcgtggagtacttgcttctctccgctcgtgacatcctcgcaatcgtcgagaagtaggggataagttcatggcaaag

SEQ ID NO: 4 - protein, 99 aa, Corynebacterium glutamicum
VANVNIKPLEDKILVQINEAETTTASGLVIPDSAKEKPQEATVIAVGPGRFDDKGNRIPLDIKEDDVVIFSRYGGTEIKFGGVEYLLLSARDILAIVEK

SEQ ID NO: 5 - DNA, 1737 bp, Corynebacterium glutamicum
  CDS (101)..(1714): RXN00493
cccgttacggcggcaccgagatcaagttcggtggcgtggagtacttgcttctctccgctcgtgacatcctcgcaatcgtcgagaagtaggggataagttcatggcaaagctcattgcttttgaccaggacgcccgcgaaggcattctccggggcgttgacgctctggcaaacgctgtcaaggtaaccctcggcccacgcggccgtaacgtggttcttgataaggcattcggcggacctctggtcaccaacgacggtgtcaccattgcccgcgacatcgaccttgaggatccttttgagaacctcggtgcgcagctggtgaagtccgttgctgttaagaccaacgacatcgctggtgacggcaccacgactgcaactctgcttgctcaggcactcattgctgaaggcctgcgcaacgttgctgctggcgcaaacccaatggagctcaacaagggtatttctgcagctgcagaaaagaccttggaagagttgaaggcacgcgcaaccgaggtgtctgacaccaaggaaatcgcaaacgtcgctaccgtttcatcccgcgatgaagttgtcggcgagatcgttgctgcagcgatggaaaaggttggcaaggacggtgtcgtcaccgttgaggagtcccagtccatcgagactgctctcgaggtcaccgaaggtatttctttcgacaagggctacctttccccttatttcatcaacgacaacgacactcagcaggctgtcctggacaaccctgcagtgctgcttgttcgcaacaagatttcttccctcccagacttcctcccattgctggagaaggttgtggagtccaaccgtcctttgctgatcatcgcagaagacgtcgagggcgagcctttgcagaccctggttgtgaactccatccgcaagaccatcaaggtcgttgcagtgaagtccccttacttcggtgaccgacgcaaggcgttcatggatgacctggctattgtcaccaaggcaactgtcgtggatccagaagtgggcatcaacctcaacgaagctggcgaagaagttttcggtaccgcacgccgcatcaccgtttccaaggacgaaaccatcatcgttgatggtgcaggttccgcagaagacgttgaagcacgtcgcggccagatccgtcgcgaaatcgccaacaccgattccacctgggatcgcgaaaaggcagaagagcgtttggctaagctctccggtggtattgctgtcatccgcgttggtgcagcaactgaaaccgaagtcaacgaccgcaagctgcgtgtcgaagatgccatcaacgctgctcgcgcagcagcacaagaaggcgttatcgctggtggcggttccgctttggttcagatcgctgagactctgaaggcttacgccgaagagttcgaaggcgaccagaaggtcggcgttcgcgcactggctactgctttgggcaagccagcgtactggatcgcctccaacgcaggtcttgacggctctgttgttgttgcacgcactgctgctctgccaaacggcgagggcttcaacgctgcaactttggaatacggaaacctgatcaacgacggtgtcatcgacccagtcaaggtcacccattccgcagtagtgaatgcaacctctgttgcacgcatggttctgaccactgaggcttctgttgttgagaagcctgcagaagaagcagccgatgcacatgcaggacatcatcaccactaaagttctgtgaaaaacaccgt

SEQ ID NO: 6 - protein, 538 aa, Corynebacterium glutamicum
MAKLIAFDQDAREGILRGVDALANAVKVTLGPRGRNVVLDKAFGGPLVTNDGVTIARDIDLEDPFENLGAQLVKSVAVKTNDIAGDGTTTATLLAQALIAEGLRNVAAGANPMELNKGISAAAEKTLEELKARATEVSDTKEIANVATVSSRDEVVGEIVAAAMEKVGKDGVVTVEESQSIETALEVTEGISFDKGYLSPYFINDNDTQQAVLDNPAVLLVRNKISSLPDFLPLLEKVVESNRPLLIIAEDVEGEPLQTLVVNSIRKTIKVVAVKSPYFGDRRKAFMDDLAIVTKATVVDPEVGINLNEAGEEVFGTARRITVSKDETIIVDGAGSAEDVEARRGQIRREIANTDSTWDREKAEERLAKLSGGIAVIRVGAATETEVNDRKLRVEDAINAARAAAQEGVIAGGGSALVQIAETLKAYAEEFEGDQKVGVRALATALGKPAYWIASNAGLDGSVVVARTAALPNGEGFNAATLEYGNLINDGVIDPVKVTHSAVVNATSVARMVLTTEASVVEKPAEEAADAHAGHHHH

SEQ ID NO: 7 - DNA, 1339 bp, Corynebacterium glutamicum
  CDS (101)..(1339): FRXA00498
cccgttacggcggcaccgagatcaagttcggtggcgtggagtacttgcttctctccgctcgtgacatcctcgcaatcgtcgagaagtaggggataagttcatggcaaagctcattgcttttgaccaggacgcccgcgaaggcattctccggggcgttgacgctctggcaaacgctgtcaaggtaaccctcggcccacgcggccgtaacgtggttcttgataaggcattcggcggacctctggtcaccaacgacggtgtcaccattgcccgcgacatcgaccttgaggatccttttgagaacctcggtgcgcagctggtgaagtccgttgctgttaagaccaacgacatcgctggtgacggcaccacgactgcaactctgcttgctcaggcactcattgctgaaggcctgcgcaacgttgctgctggcgcaaacccaatggagctcaacaagggtatttctgcagctgcagaaaagaccttggaagagttgaaggcacgcgcaaccgaggtgtctgacaccaaggaaatcgcaaacgtcgctaccgtttcatcccgcgatgaagttgtcggcgagatcgttgctgcagcgatggaaaaggttggcaaggacggtgtcgtcaccgttgaggagtcccagtccatcgagactgctctcgaggtcaccgaaggtatttctttcgacaagggctacctttccccttatttcatcaacgacaacgacactcagcaggctgtcctggacaaccctgcagtgctgcttgttcgcaacaagatttcttccctcccagacttcctcccattgctggagaaggttgtggagtccaaccgtcctttgctgatcatcgcagaagacgtcgagggcgagcctttgcagaccctggttgtgaactccatccgcaagaccatcaaggtcgttgcagtgaagtccccttacttcggtgaccgacgcaaggcgttcatggatgacctggctattgtcaccaaggcaactgtcgtggatccagaagtgggcatcaacctcaacgaagctggcgaagaagttttcggtaccgcacgccgcatcaccgtttccaaggacgaaaccatcatcgttgatggtgcaggttccgcagaagacgttgaagcacgtcgcggccagatccgtcgcgaaatcgccaacaccgattccacctgggatcgcgaaaaggcagaagagcgtttggctaagctctccggtggtattgctgtcatccgcgttggtgcagcaactgaaaccgaagtcaacgaccgcaagctgcgtgtcgaagatgccatcaacgctgctcgcgcagcagcacaagaaggcgttatcgctggtggc

SEQ ID NO: 8 - protein, 413 aa, Corynebacterium glutamicum
MAKLIAFDQDAREGILRGVDALANAVKVTLGPRGRNVVLDKAFGGPLVTNDGVTIARDIDLEDPFENLGAQLVKSVAVKTNDIAGDGTTTATLLAQALIAEGLRNVAAGANPMELNKGISAAAEKTLEELKARATEVSDTKEIANVATVSSRDEVVGEIVAAAMEKVGKDGVVTVEESQSIETALEVTEGISFDKGYLSPYFINDNDTQQAVLDNPAVLLVRNKISSLPDFLPLLEKVVESNRPLLIIAEDVEGEPLQTLVVNSIRKTIKVVAVKSPYFGDRRKAFMDDLAIVTKATVVDPEVGINLNEAGEEVFGTARRITVSKDETIIVDGAGSAEDVEARRGQIRREIANTDSTWDREKAEERLAKLSGGIAVIRVGAATETEVNDRKLRVEDAINAARAAAQEGVIAGG

SEQ ID NO: 9 - DNA, 723 bp, Corynebacterium glutamicum
  CDS (101)..(700): RXA01217
gcgctgcctgcgaagactcgaccaagacattcgagtcggtcgcgggcattttttattttcgcggccgagtgtccaccttcatccatgaggagaaatcactatggcaaagtaccaaaccattgaggctgctgtccgctctgagttcggcaagggctctgcacgtcgtgcacgcgttgctggccagatccctgctgttgtttacggcgcagatgttgagtccaacctgcacgtcaccatcgaccaccgcaccttcgctgcgctggttcgccaggaaggcgtaaacgctgttcttgagctcgacatcgagggccagaagcagctcaccatgatcaagcacatcgaccagaacgtgctgaccttccacatcgaccacttggacctgcttgccattaagcgcggcgaaaaggttgaggttgacgttccagttatcgtcgagggcgagccagctccaggcaccatgtgggttcaggatgctgacaccatcaaggttgaggctgacgttctgtccatccctgaagagttcaccgtttccatcgaaggccttgagctcggcgcacagatcaccgcagctgacatcaagctcgagggcgacaccaccctggttgaggatcctgagaccctcatcgtcaacatcgttctcccagctgtcgaggaagaagacaccgaagaggacgaagcagctgaagaagcagctactgagtaagcttttttagatagctttat

SEQ ID NO: 10 - protein, 200 aa, Corynebacterium glutamicum
MAKYQTIEAAVRSEFGKGSARRARVAGQIPAVVYGADVESNLHVTIDHRTFAALVRQEGVNAVLELDIEGQKQLTMIKHIDQNVLTFHIDHLDLLAIKRGEKVEVDVPVIVEGEPAPGTMWVQDADTIKVEADVLSIPEEFTVSIEGLELGAQITAADIKLEGDTTLVEDPETLIVNIVLPAVEEEDTEEDEAAEEAATE

SEQ ID NO: 11 - DNA, 1603 bp, Corynebacterium glutamicum
  CDS (33)..(1580): RXA00605
ataggtaaccctcataaaaggaaggaatgctaatgtctgagaagtcagcagcagaccagatcgtagatcgcggaatgcgtccaaagctttctggaaacactacccgccacaacggagcaccagttccatctgagaacatctccgcaaccgcaggcccacagggtccaaacgttctcaatgacattcacctcattgaaaagctcgcacactttaaccgcgagaacgttccagagcgtatccctcacgcaaagggccacggcgctttcggtgagctgcacatcaccgaggacgtatccgaatacaccaaggcagacctgttccagcctggtaaggtcaccccgctggctgttcgcttctctactgttgctggtgagcagggctccccagatacctggcgcgacgtccacggcttcgctcttcgcttctacaccgaagagggcaactacgacatcgtgggtaacaacaccccaaccttcttccttcgtgacggcatgaagttcccggacttcatccactcacagaagcgtctcaacaagaacggtctgcgcgatgcagacatgcagtgggatttctggacccgcgcacctgaatctgcacaccaggtgacctacctgatgggtgaccgcggtacccctaagacctcccgccaccaggacggcttcggctcccacaccttccagtggatcaacgctgaaggtaagccagtttgggttaagtaccacttcaagacccgccagggctgggattgcttcaccgatgcagaagcagcaaaggttgcaggcgagaacgctgactaccagcgcgaagacctctacaacgctattgaaaacggcgacttcccaatctgggacgtcaaggttcagatcatgcctttcgaggatgcagagaactaccgctggaacccattcgacctgaccaagacctggtcccagaaggattacccactgatcccagtcggttacttcatcctgaaccgcaacccacgcaacttcttcgctcagatcgagcagcttgcactggatccaggcaacatcgttcctggcgtcggcctgtccccagaccgcatgctccaggcacgtatcttcgcatacgctgaccagcagcgttaccgcatcggcgctaactaccgcgacctgccagtgaaccgtccaatcaacgaggtcaacacctacagccgcgaaggttccatgcagtacatcttcgacgctgagggcgagccttcctacagccctaaccgctacgacaagggcgcaggctacctggataacggtacggattcctcctccaaccacacctcctacggccaggctgatgacatctacgtcaacccagacccacacggcaccgacctggttcgtgctgcttacgtcaagcaccaggatgatgacgacttcatccagccaggcatcctataccgcgaggtcctggatgagggcgagaaggagcgattggcagacaacatctccaacgcaatgcagggcatctctgaggcaaccgagccacgcgtctacgactactggaacaacgttgatgagaacctcggcgctcgcgtcaaggagctttacctccagaagaaggcttaagtccttctgatttaaaatga

SEQ ID NO: 12 - protein, 516 aa, Corynebacterium glutamicum
MSEKSAADQIVDRGMRPKLSGNTTRHNGAPVPSENISATAGPQGPNVLNDIHLIEKLAHFNRENVPERIPHAKGHGAFGELHITEDVSEYTKADLFQPGKVTPLAVRFSTVAGEQGSPDTWRDVHGFALRFYTEEGNYDIVGNNTPTFFLRDGMKFPDFIHSQKRLNKNGLRDADMQWDFWTRAPESAHQVTYLMGDRGTPKTSRHQDGFGSHTFQWINAEGKPVWVKYHFKTRQGWDCFTDAEAAKVAGENADYQREDLYNAIENGDFPIWDVKVQIMPFEDAENYRWNPFDLTKTWSQKDYPLIPVGYFILNRNPRNFFAQIEQLALDPGNIVPGVGLSPDRMLQARIFAYADQQRYRIGANYRDLPVNRPINEVNTYSREGSMQYIFDAEGEPSYSPNRYDKGAGYLDNGTDSSSNHTSYGQADDIYVNPDPHGTDLVRAAYVKHQDDDDFIQPGILYREVLDEGEKERLADNISNAMQGISEATEPRVYDYWNNVDENLGARVKELYLQKKA

SEQ ID NO: 13 - DNA, 2439 bp, Corynebacterium glutamicum
  CDS (101)..(2416): RXA00404
aagatccgatcatcggcatacagaaacacccatctggccgaactttcctttttctgcatgcatttctgcacacagtttctgcccgctgtttctacgcatagtggctttgaaacgacccgaagagaaaacagtaaagatcgtgaccataaaacagactgacaacatcaatgacgatgatttggtgtacagcaacgctactgaccttccagtaggcgtgaagaagtcccctaaaatgtcaccgaccgcccgcgttggtctccttgtctttggggttatcgcggcggtgggttggggagcaatcgctttctcccgtggcgaaacaatcaactctgtgtggctggttttggcggcagttggttcctatatcattgcgttttctttctatgcccgactgattgaatacaaagttgttaagccgaaagatcagcgagcaaccccggcggaatacgttaatgacggcaaggactatgtcccaacggatcgtcgtgtgctttttggccaccactttgcagctattgcaggtgccggtccattggttggacctgtcatggccgcgcagatgggctacctgccaggcaccttgtggattatcctcggtgtgattttcgccggtgcagtgcaggactacctagtgctgtgggtgtctactcgtaggcgtggacgctcacttggccagatggttcgtgatgaaatgggcacggtcggtggagctgccggtatcttggcgaccatctccatcatgatcatcattatcgcggtgctcgcattgatcgtggttaatgcactggctgattcaccatggggcgttttctccatcaccatgaccatcccaattgcactgttcatgggtgtgtacttgcgttacctgcgcccaggtcgtgttactgaagtgtccatcatcggtgtggcactgctcctgctggctatcgttgctggtggttgggttgcagacacctcatggggcgtggaatggttcacctggtctaagaccactttggcgttggccttgatcggttacggaatcatggctgcgattttgccggtgtggctgctgcttgcaccgcgcgattacctgtctacctttatgaagatcggcgtcatcggtctgttggcagtgggtattttgttcgcacgtcctgaggtgcagatgccttccgtgacctccttcgcacttgagggcaacggtccggtgttctctggaagtctgttcccattcctgttcatcacgattgcctgtggtgcactgtctggtttccacgcactgatttcttcaggaaccacaccaaagcttgtggagaaggaatcccagatgcgcatgctcggctacggcggcatgttgatggaatctttcgtggcgatgatggcactgatcaccgctgttattctggatcgtcacctgtacttctccatgaacgctccgctggcactgactggtggagatccagcaaccgcagctgagtgggttaactccattgggctgacaggtgcggatatcaccccggaacagctgtcggaagctgctgaaagtgtcggagaatccactgttatttcccgtaccggtggcgcaccaaccttggcgttcggtatgtctgaaatcctctccggattcatcggcggcgctggaatgaaggcgttctggtaccacttcgccatcatgtttgaggctctgttcatcctcactactgtggatgcaggtactcgtgtggctcgctttatgatgaccgataccttgggcaatgttccaggtctgcgccgtttcaaggatccttcatggactgtcggtaactggatttctaccgtgtttgtgtgtgctctatggggtgctattttgctcatgggtgttaccgatccactgggcggcatcaacgtgcttttcccactattcggtatcgctaaccagctgctcgccgctattgcacttgctctcgtgctggttgttgtggtgaagaagggcctgtacaagtgggcgtggattccagctgttcctttggcatgggatctcattgtcacgatgactgcgtcatggcagaagattttccactctgatccggctattggctactgggctcagaacgcgaacttccgcgatgcaaagtctcaaggccttaccgaatttggtgccgctaaatctcctgaggcaatcgatgcggttatccgaaacaccatgattcagggcatcttgtccatcctgttcgcggtgctcgtcctcgttgttgtcggcgcagccattgcggtgtgcatcaagtccatcagggctcgtgcagccggaacacctttggagaccactgaagagcctgatactgaatctgagttcttcgccccaactggattccttgcatcttccagggataaggaagtccaggccatgtgggacgagcgctacccaggcggtgcgcccgtgtcttctggagggcactaaaacatgatggctcttactca

SEQ ID NO: 14 - protein, 772 aa, Corynebacterium glutamicum
VALKRPEEKTVKIVTIKQTDNINDDDLVYSNATDLPVGVKKSPKMSPTARVGLLVFGVIAAVGWGAIAFSRGETINSVWLVLAAVGSYIIAFSFYARLIEYKVVKPKDQRATPAEYVNDGKDYVPTDRRVLFGHHFAAIAGAGPLVGPVMAAQMGYLPGTLWIILGVIFAGAVQDYLVLWVSTRRRGRSLGQMVRDEMGTVGGAAGILATISIMIIIIAVLALIVVNALADSPWGVFSITMTIPIALFMGVYLRYLRPGRVTEVSIIGVALLLLAIVAGGWVADTSWGVEWFTWSKTTLALALIGYGIMAAILPVWLLLAPRDYLSTFMKIGVIGLLAVGILFARPEVQMPSVTSFALEGNGPVFSGSLFPFLFITIACGALSGFHALISSGTTPKLVEKESQMRMLGYGGMLMESFVAMMALITAVILDRHLYFSMNAPLALTGGDPATAAEWVNSIGLTGADITPEQLSEAAESVGESTVISRTGGAPTLAFGMSEILSGFIGGAGMKAFWYHFAIMFEALFILTTVDAGTRVARFMMTDTLGNVPGLRRFKDPSWTVGNWISTVFVCALWGAILLMGVTDPLGGINVLFPLFGIANQLLAAIALALVLVVVVKKGLYKWAWIPAVPLAWDLIVTMTASWQKIFHSDPAIGYWAQNANFRDAKSQGLTEFGAAKSPEAIDAVIRNTMIQGILSILFAVLVLVVVGAAIAVCIKSIRARAAGTPLETTEEPDTESEFFAPTGFLASSRDKEVQAMWDERYPGGAPVSSGGH

SEQ ID NO: 15 - DNA, 255 bp, Corynebacterium glutamicum
  CDS (101)..(232): RXN03119
tgggaggtgtcgcaccaagtacttttgcgaagcgccatctgacggattttcaaaagatgtatatgctcggtgcggaaacctacgaaaggattttttacccatggctgtatacgaactcccagaactcgactacgcatacgacgctctcgagccacacatcgtcgctgaaatcatggagcttgaccagtccaaggaccacgcaacctacgttgcgggcgcaaatgcagcactctaggcactagagaaggcacgcga

SEQ ID NO: 16 - protein, 44 aa, Corynebacterium glutamicum
MAVYELPELDYAYDALEPHIVAEIMELDQSKDHATYVAGANAAL

SEQ ID NO: 17 - DNA, 249 bp, Corynebacterium glutamicum
  CDS (101)..(226): RXN03120
ctgggcagttcttgggtacgaccacatatccggtcgcctggttatcgagcagctcaccgaccaggagggcaacatctccttcgacatcaccccagttctgatgctcgatatgtgggagcacgctttctacctgcagtacatgaacgttaaggcagattacgtcaaggctgtttggaacgtcttcaactgggacgacgcaagagcacgcttcgcagcagcttccaagtaagcatttttagtccgtgcaat

SEQ ID NO: 18 - protein, 42 aa, Corynebacterium glutamicum
MLDMWEHAFYLQYMNVKADYVKAVWNVFNWDDARARFAAASK

SEQ ID NO: 19 - DNA, 660 bp, Corynebacterium glutamicum
  CDS (101)..(637): RXN00575
gaagcgtccgcaggcaagaaaacgtcccggaaaacggcgataggggtcacccgcgcatgtccggttgccgatctatttaaataccaggacaattgcgtgcatggttgaaagagacttcactatccgaccaatccgcgagggtgatttccctcaggtgagggacatctacgaattgggcctggagacgggacatgcgacttatgagacttctggtcccacgtgggaccagttctcccaatctaaaatcatggataccgtcatggtggcggtagaaaacaacgacccggacttcatcctcggatgggtgtctgctgctccaatttcaagccgacaggttttccatggagtggtggaagattccatctatatccacccccagggccaaggccgaggaatcggcggcgctttgctcgacgcccttatcacctactgcgaaagcaacggcatctggtcgatccactcctggatcttcccggaaaacctcggttctgcgaaactgcatgaatcgaagggcttcgtgaaggtgggcaccatgcaccaaatggcaaggatgccctacggcgagatggaaggacaatggcgcgattgtgatctgtgggagtgcctcttatccgttccagagcaagctcaaagttcctaaagcaatttaaatctgacttt

SEQ ID NO: 20 - protein, 179 aa, Corynebacterium glutamicum
MVERDFTIRPIREGDFPQVRDIYELGLETGHATYETSGPTWDQFSQSKIMDTVMVAVENNDPDFILGWVSAAPISSRQVFHGVVEDSIYIHPQGQGRGIGGALLDALITYCESNGIWSIHSWIFPENLGSAKLHESKGFVKVGTMHQMARMPYGEMEGQWRDCDLWECLLSVPEQAQSS

SEQ ID NO: 21 - DNA, 606 bp, Corynebacterium glutamicum
  CDS (101)..(583): FRXA00575
gcatgtccggttgccgatctatttaaataccaggacaattgcgtgcatggttgaaagagacttcactatccgaccaatccgcgagggtgatttccctcaggtgagggacatctacgaattgggcctggagacgggacatgcgacttatgagacttctggtcccacgtgggaccagttctcccaatctaaaatcatggataccgtcatggtggcggtagaaaacaacgacccggacttcatcctcggatgggtgtctgctgctccaatttcaagccgacaggttttccatggagtggtggaagattccatctatatccacccccagggccaaggccgaggaatcggcggcgctttgctcgacgcccttatcacctactgcgaaagcaacggcatctggtcgatccactcctggatcttcccggaaaacctcggttctgcgaaactgcatgaatcgaagggcttcgtgaaggtgggcaccatgcaccaaatggcaaggatgccctacggcgagatggaaggacaatggcgcgattgtgatctgtgggagtgcctcttatccgttccagagcaagctcaaagttcctaaagcaatttaaatctgacttt

SEQ ID NO: 22 - protein, 161 aa, Corynebacterium glutamicum
VRDIYELGLETGHATYETSGPTWDQFSQSKIMDTVMVAVENNDPDFILGWVSAAPISSRQVFHGVVEDSIYIHPQGQGRGIGGALLDALITYCESNGIWSIHSWIFPENLGSAKLHESKGFVKVGTMHQMARMPYGEMEGQWRDCDLWECLLSVPEQAQSS

SEQ ID NO: 23 - DNA, 1575 bp, Corynebacterium glutamicum
  CDS (101)..(1552): RXN01345
cataacctcattgaacatgcaaaactaatgcttttggggggtatgcataaattcgtttcgttccactgcacagcccgaaaatgctgctagggtcaagttcatgcgttttggacttgacttgggaactacccgcacaatcgcggccgccgtggaccgcggaaactatcccatcgtcactgtggaagattctttaggcgacacccacgatttcattccatctgtggtggccctcaaggcagataggattgtcgcgggttgggatgctattgaggttgggcaggaccacccttccttcgtacgttctttcaaacgcctactctctgaacccaatgtcacggaagccaccccggtctacttgggcgatcatgtacaccctttgggcgccgtcctggaggcttttgcggaaaacgtggtcactgcgctgcgtgcatttcagacgcaattgggagatacctccccgatcgaagtagtcattggtgtgcccgccaactcccacagcgcccagcgactgctcaccatgtccgccttcagcgccacaggcatcaccgttgtcggtttggtcaatgagcccagcgccgcagctttcgagtacacccaccgccacgcccgcaccttaaactccaagcgccaagccatcgtggtttatgatttgggaggcggaacattcgactcctcgctcatccgcatcgacggcacccaccacgaggttgtgtcctccattggcatttcacgccttggtggcgatgatttcgatgaaatcctcctccaatgcgcgctcaaggccgcaggcagacagcacgatgcgtttggcaagcgtgctaaaaacacgcttctcgacgaatcccgcaacgcgaaggaagctcttgttccgcaatcccgtcgcttggttctagaaattggcgacgacgacatcaccgttccagtgaacaagttctacgaggctgccactcccctggtggaaaaatccttgtccatcatggaacccctcatcggcgtcgatgatcttaaagattccgacatcgcaggcatctaccttgttggtggaggatcctcgctcccactcgtttccaggttgctccgcgagcgtttcggccgccgtgtccaccgctccccattcccctcaggttccactgcggtgggtctggccatcgcggctgacccttcctctggtttccacctaagggaccgcgttgcgcgaggcatcggtgtgttccgtgagcacgattctggtcgtgccgtgagctttgacccgctgatcgccccggacaccgattctgcgaccgtggcgaaacgatgctacaaggcggtgcacaacattggttggttcaggttcgtggaatactccaccgtgtccgaggatggcagccccggagatatttccctgctcagtgaaatcaagattccttttgatagctccatcaccgatgtggatgctaccgagatttcacgtttcgatggcccagaagtagaagaaaccatcacagtcaatgacaacggcgtggcttccatttccatcaagatactcggcggcgttaccgtcgagcacacaatttagttaccattttggtgctggtg

SEQ ID NO: 24 - protein, 484 aa, Corynebacterium glutamicum
MRFGLDLGTTRTIAAAVDRGNYPIVTVEDSLGDTHDFIPSVVALKADRIVAGWDAIEVGQDHPSFVRSFKRLLSEPNVTEATPVYLGDHVHPLGAVLEAFAENVVTALRAFQTQLGDTSPIEVVIGVPANSHSAQRLLTMSAFSATGITVVGLVNEPSAAAFEYTHRHARTLNSKRQAIVVYDLGGGTFDSSLIRIDGTHHEVVSSIGISRLGGDDFDEILLQCALKAAGRQHDAFGKRAKNTLLDESRNAKEALVPQSRRLVLEIGDDDITVPVNKFYEAATPLVEKSLSIMEPLIGVDDLKDSDIAGIYLVGGGSSLPLVSRLLRERFGRRVHRSPFPSGSTAVGLAIAADPSSGFHLRDRVARGIGVFREHDSGRAVSFDPLIAPDTDSATVAKRCYKAVHNIGWFRFVEYSTVSEDGSPGDISLLSEIKIPFDSSITDVDATEISRFDGPEVEETITVNDNGVASISIKILGGVTVEHTI

SEQ ID NO: 25 - DNA, 1267 bp, Corynebacterium glutamicum
  CDS (101)..(1267): FRXA01345
cataacctcattgaacatgcaaaactaatgcttttggggggtatgcataaattcgtttcgttccactgcacagcccgaaaatgctgctagggtcaagttcatgcgttttggacttgacttgggaactacccgcacaatcgcggccgccgtggaccgcggaaactatcccatcgtcactgtggaagattctttaggcgacacccacgatttcattccatctgtggtggccctcaaggcagataggattgtcgcgggttgggatgctattgaggttgggcaggaccacccttccttcgtacgttctttcaaacgcctactctctgaacccaatgtcacggaagccaccccggtctacttgggcgatcatgtacaccctttgggcgccgtcctggaggcttttgcggaaaacgtggtcactgcgctgcgtgcatttcagacgcaattgggagatacctccccgatcgaagtagtcattggtgtgcccgccaactcccacagcgcccagcgactgctcaccatgtccgccttcagcgccacaggcatcaccgttgtcggtttggtcaatgagcccagcgccgcagctttcgagtacacccaccgccacgcccgcaccttaaactccaagcgccaagccatcgtggtttatgatttgggaggcggaacattcgactcctcgctcatccgcatcgacggcacccaccacgaggttgtgtcctccattggcatttcacgccttggtggcgatgatttcgatgaaatcctcctccaatgcgcgctcaaggccgcaggcagacagcacgatgcgtttggcaagcgtgctaaaaacacgcttctcgacgaatcccgcaacgcgaaggaagctcttgttccgcaatcccgtcgcttggttctagaaattggcgacgacgacatcaccgttccagtgaacaagttctacgaggctgccactcccctggtggaaaaatccttgtccatcatggaacccctcatcggcgtcgatgatcttaaagattccgacatcgcaggcatctaccttgttggtggaggatcctcgctcccactcgtttccaggttgctccgcgagcgtttcggccgccgtgtccaccgctccccattcccctcaggttccactgcggtgggtctggccatcgcggctgacccttcctctggtttccacctaagggaccgcgttgcgcgaggcatcggtgtgttccgtgagcacgattctggtcgtgccgtgagctttgacccgctgatcgccccggac

SEQ ID NO: 26 - protein, 389 aa, Corynebacterium glutamicum
MRFGLDLGTTRTIAAAVDRGNYPIVTVEDSLGDTHDFIPSVVALKADRIVAGWDAIEVGQDHPSFVRSFKRLLSEPNVTEATPVYLGDHVHPLGAVLEAFAENVVTALRAFQTQLGDTSPIEVVIGVPANSHSAQRLLTMSAFSATGITVVGLVNEPSAAAFEYTHRHARTLNSKRQAIVVYDLGGGTFDSSLIRIDGTHHEVVSSIGISRLGGDDFDEILLQCALKAAGRQHDAFGKRAKNTLLDESRNAKEALVPQSRRLVLEIGDDDITVPVNKFYEAATPLVEKSLSIMEPLIGVDDLKDSDIAGIYLVGGGSSLPLVSRLLRERFGRRVHRSPFPSGSTAVGLAIAADPSSGFHLRDRVARGIGVFREHDSGRAVSFDPLIAPD

SEQ ID NO: 27 - DNA, 1308 bp, Corynebacterium glutamicum
  CDS (101)..(1285): RXA02541
atccgccggtgtccggacaacaaaacttgcaacacaagataacttaagaaattgcatacaattcaccgcatataagactcatggaaggaggggatgcccagtgaacaacagcgaatgggcaaataagaactattacgcagacctgggggtctcctcgtccgcttcagaagatgagatcaaaaaggcttaccgcaagctcgccagggaaaatcacccagataaaaatccaggtgacaaggccgctgaagatcgattcaaaaaagcggccgaggcatatgacgtacttggtgatgacaagaaacgaaaagaatacgacgagctcaaagcacttctagcttctggtggaatccgcggaggattcggaagcggaggtgcgggattccccggcgggtttcgcacgtcgacgggaggattcgacacctcagacctcttcggaggaggacaaggtggagggttttctacggacggcggtttgggcgatatcttcggtggccttttcaaccgcggcgctggttctcaccagtcagctaggccgacgcggggggcggatgtacaaaccgaaataactctctcgtttgttgaggcagcgaaaggcacgaccatcccagtggaactcaccggcgatgcgccctgcaacacctgccacggatcgggctccaaatcaggccaccccgcaaaatgtggaacctgtgatggaaccggattcacctctgagaacaagggtgctttcggattctccgctccatgtgcaacctgtggtggcactggtgaaataatcactgatccttgcgataactgccacggccgaggcaccgtccggaagtctcgttccatcaccgtgcgtatcccaactggtgtggaagatggacagaaagttcgtcttgcaggccaaggcgaagcaggaccaaatggcaaaccagcgggcgatctctttgtgaaagtccacgtgaaaaaggacgatgtgttcacacgcgacggcagcaacattttgatcaccattcccgtgagcttcagcgagctggctttgggtggcgctatttctgtgccaacgctcaacaagcctgtaaaactcaagctacctgcgggaacgccagatggtcgtactttgcgtgtacgcggtcgcggtatcgaagcacgtgattccactggtgatctgctggttacagtccaggtttctgtcccgaagaatctggatgacaacgctgcggaagctctccgcgcatatgctgaagcagaaactaattcaggttttgatccccgcgctaactgggcgggccagaaccgctagacgttctctttgagaaagga

SEQ ID NO: 28 - protein, 395 aa, Corynebacterium glutamicum
VNNSEWANKNYYADLGVSSSASEDEIKKAYRKLARENHPDKNPGDKAAEDRFKKAAEAYDVLGDDKKRKEYDELKALLASGGIRGGFGSGGAGFPGGFRTSTGGFDTSDLFGGGQGGGFSTDGGLGDIFGGLFNRGAGSHQSARPTRGADVQTEITLSFVEAAKGTTIPVELTGDAPCNTCHGSGSKSGHPAKCGTCDGTGFTSENKGAFGFSAPCATCGGTGEIITDPCDNCHGRGTVRKSRSITVRIPTGVEDGQKVRLAGQGEAGPNGKPAGDLFVKVHVKKDDVFTRDGSNILITIPVSFSELALGGAISVPTLNKPVKLKLPAGTPDGRTLRVRGRGIEARDSTGDLLVTVQVSVPKNLDDNAAEALRAYAEAETNSGFDPRANWAGQNR

SEQ ID NO: 29 - DNA, 777 bp, Corynebacterium glutamicum
  CDS (101)..(754): RXA02542
ccaggctgacgcaggtgcagaaggcgctgcagatgacaatgttgttgacgctgaagttgtcgaagacgacgcagctgacaatggtgaggacaagaagtaaatgactacccctaacggaatgcccgacaatcctggggatcctgaaaataccgatccagaggcaacctctgctgatcgtgctgagcaggcagctgaagaagcagctgcccgccaagcggaggaatctccatttggacaggcctcagaggaagaaatttctccagagctcgaagcagagatcaatgatcttctatcagatgttgatccagatttggatggcgatggtgaagtgtccgctgtagaaacacagcttgccgaacgcactgaggatctgcagcgagtcaccgctgagtacgccaactaccgtcgacgtaccgagcgtgaacgccagggcatcatcgacaccgcacgcgcaggtgttgttacccaacttctgccgttgctcgacgatcttgacctggctgaacagcacggtgaccttaacgaaggtccgctgaagtcactgtctgacaagctgatcaacatcctgggtggattgaaggtggaatccttcggcgagatcggcgaagcattcgatccagagatccacgaagcagtacaggatctctcacagggtgatgtcaaggttctgggaacggtactccgcaagggataccgcctcggcgaccgcgtcatccgcaccgcaatggtcctcattggggatccagaggagagctagagagactaagtctcttagtg

SEQ ID NO: 30 - protein, 218 aa, Corynebacterium glutamicum
MTTPNGMPDNPGDPENTDPEATSADRAEQAAEEAAARQAEESPFGQASEEEISPELEAEINDLLSDVDPDLDGDGEVSAVETQLAERTEDLQRVTAEYANYRRRTERERQGIIDTARAGVVTQLLPLLDDLDLAEQHGDLNEGPLKSLSDKLINILGGLKVESFGEIGEAFDPEIHEAVQDLSQGDVKVLGTVLRKGYRLGDRVIRTAMVLIGDPEES

SEQ ID NO: 31 - DNA, 1977 bp, Corynebacterium glutamicum
  CDS (101)..(1954): RXN02543
ctcaatgaggagtttttcttaccggcgaaagtcggtgggaagcaagtcaaagctcaagccgtggacagtactaaaatcacctaaaacaggaggcaccattatgggacgtgcagtaggaattgaccttggaaccaccaactctgtggtttccgtacttgaaggcggcgagccagtagttatcgcaaacgcagaaggctcacgcaccaccccttccgtcgttgcattcgcaaagaacggtgaagttctagtcggccagtccgctaagaaccaggcggtcaccaacgttgaccgcaccattcgctccgtcaagcgccacatcggcaccgactggtccgttgctatcgatgacaagaactacacctcacaggaaatctcggctcgtaccctgatgaagctgaagcgcgacgctgaagcatacctgggcgaggacgtcactgatgctgttattaccgttcctgcatacttcgaggactcacagcgccaggcaaccaaggaagctggtcagatcgcaggccttaacgttctgcgtattgttaacgagccaaccgcggctgcacttgcatacggccttgagaagggcgagcaggagcagaccattctggtattcgacctcggtggcggcaccttcgacgtctccctcctagagatcggcgacggtgttgttgaggttcgcgcaacctccggcgataacgagctcggtggcgacgactgggatcagcgtatcgttgactggctggtagagaagttccagtcctccaacggcattgacctgaccaaggacaagatggccctgcagcgtctgcgtgaggcagctgagaaggcaaagatcgagctgtcctcttcccagagtgcaaacatcaaccttccttacatcaccgttgatgcagacaagaacccactgttcttggatgagaccctttcccgtgccgagttccagcgcatcacccaggacctcctggcccgcaccaagactcctttcaaccaggttgttaaggacgctggcgtgtccgtctcggagatcgaccacgttgttctcgtcggtggttccacccgtatgcctgctgttaccgaactggtcaaggaactgaccggtggacgtgagccaaacaagggtgttaacccagatgaggttgttgcagttggtgcagcacttcaggccggtgttctccgcggcgaggtcaaggatgttcttcttcttgacgtcaccccactgtccctcggcattgagaccaagggtggcgtgatgaccaagctcatcgagcgcaacaccaccatccctaccaagcgttccgagaccttcaccaccgcagaggacaaccagccttctgttcagatccaggtcttccagggcgagcgtgaaatcgcaaccgccaacaagctgctcggatccttcgagctcggcggcatcgcacctgcaccacgtggcgtcccacagatcgaggtcactttcgacatcgacgccaacggcatcgtccacgtcaccgcaaaggacaagggtactggcaaggaaaacaccatcaccattcaggacggctccggtctctcccaggatgaaattgatcgcatgatcaaggatgctgaagctcacgctgatgaggacaagaagcgccgcgaggagcaggaagtccgcaacaacgctgagtccctggtttaccagacccgcaagttcgttgaagagaactccgagaaggtctccgaagacctcaaggcaaaggtcgaagaggcagccaagggcgttgaagaagcactcaagggcgaggacctcgaggcaatcaaggctgcagttgagaagctgaacaccgagtcccaggaaatgggtaaggctatctacgaggctgacgctgctgctggtgcaacccaggctgacgcaggtgcagaaggcgctgcagatgacaatgttgttgacgctgaagttgtcgaagacgacgcagctgacaatggtgaggacaagaagtaaatgactacccctaacggaat

SEQ ID NO: 32 - protein, 618 aa, Corynebacterium glutamicum
MGRAVGIDLGTTNSVVSVLEGGEPVVIANAEGSRTTPSVVAFAKNGEVLVGQSAKNQAVTNVDRTIRSVKRHIGTDWSVAIDDKNYTSQEISARTLMKLKRDAEAYLGEDVTDAVITVPAYFEDSQRQATKEAGQIAGLNVLRIVNEPTAAALAYGLEKGEQEQTILVFDLGGGTFDVSLLEIGDGVVEVRATSGDNELGGDDWDQRIVDWLVEKFQSSNGIDLTKDKMALQRLREAAEKAKIELSSSQSANINLPYITVDADKNPLFLDETLSRAEFQRITQDLLARTKTPFNQVVKDAGVSVSEIDHVVLVGGSTRMPAVTELVKELTGGREPNKGVNPDEVVAVGAALQAGVLRGEVKDVLLLDVTPLSLGIETKGGVMTKLIERNTTIPTKRSETFTTAEDNQPSVQIQVFQGEREIATANKLLGSFELGGIAPAPRGVPQIEVTFDIDANGIVHVTAKDKGTGKENTITIQDGSGLSQDEIDRMIKDAEAHADEDKKRREEQEVRNNAESLVYQTRKFVEENSEKVSEDLKAKVEEAAKGVEEALKGEDLEAIKAAVEKLNTESQEMGKAIYEADAAAGATQADAGAEGAADDNVVDAEVVEDDAADNGEDKK

SEQ ID NO: 33 - DNA, 1977 bp, Corynebacterium glutamicum
  CDS (101)..(1954): FRXA02543
  modified_base (1824): a, c, g, t, unknown or other
  modified_base (1830): a, c, g, t, unknown or other
  modified_base (1844): a, c, g, t, unknown or other
ctcaatgaggagtttttcttaccggcgaaagtcggtgggaagcaagtcaaagctcaagccgtggacagtactaaaatcacctaaaacaggaggcaccattatgggacgtgcagtaggaattgaccttggaaccaccaactctgtggtttccgtacttgaaggcggcgagccagtagttatcgcaaacgcagaaggctcacgcaccaccccttccgtcgttgcattcgcaaagaacggtgaagttctagtcggccagtccgctaagaaccaggcggtcaccaacgttgaccgcaccattcgctccgtcaagcgccacatcggcaccgactggtccgttgctatcgatgacaagaactacacctcacaggaaatctcggctcgtaccctgatgaagctgaagcgcgacgctgaagcatacctgggcgaggacgtcactgatgctgttattaccgttcctgcatacttcgaggactcacagcgccaggcaaccaaggaagctggtcagatcgcaggccttaacgttctgcgtattgttaacgagccaaccgcggctgcacttgcatacggccttgagaagggcgagcaggagcagaccattctggtattcgacctcggtggcggcaccttcgacgtctccctcctagagatcggcgacggtgttgttgaggttcgcgcaacctccggcgataacgagctcggtggcgacgactgggatcagcgtatcgttgactggctggtagagaagttccagtcctccaacggcattgacctgaccaaggacaagatggccctgcagcgtctgcgtgaggcagctgagaaggcaaagatcgagctgtcctcttcccagagtgcaaacatcaaccttccttacatcaccgttgatgcagacaagaacccactgttcttggatgagaccctttcccgtgccgagttccagcgcatcacccaggacctcctggcccgcaccaagactcctttcaaccaggttgttaaggacgctggcgtgtccgtctcggagatcgaccacgttgttctcgtcggtggttccacccgtatgcctgctgttaccgaactggtcaaggaactgaccggtggacgtgagccaaacaagggtgttaacccagatgaggttgttgcagttggtgcagcacttcaggccggtgttctccgcggcgaggtcaaggatgttcttcttcttgacgtcaccccactgtccctcggcattgagaccaagggtggcgtgatgaccaagctcatcgagcgcaacaccaccatccctaccaagcgttccgagaccttcaccaccgcagaggacaaccagccttctgttcagatccaggtcttccagggcgagcgtgaaatcgcaaccgccaacaagctgctcggatccttcgagctcggcggcatcgcacctgcaccacgtggcgtcccacagatcgaggtcactttcgacatcgacgccaacggcatcgtccacgtcaccgcaaaggacaagggtactggcaaggaaaacaccatcaccattcaggacggctccggtctctcccaggatgaaattgatcgcatgatcaaggatgctgaagctcacgctgatgaggacaagaagcgccgcgaggagcaggaagtccgcaacaacgctgagtccctggtttaccagacccgcaagttcgttgaagagaactccgagaaggtctccgaagacctcaaggcaaaggtcgaagaggcagccaagggcgttgaagaagcactcaagggcgaggacctcgaggcaatcaaggctgcagttgagaagctgaacaccgagtcccaggaaatgggtaaggntatctncgaggctgacgctnctgctggtgcaacccaggctgacgcaggtgcagaaggcgctgcagatgacaatgttgttgacgctgaagttgtcgaagacgacgcagctgacaatggtgaggacaagaagtaaatgactacccctaacggaat

SEQ ID NO: 34 - protein, 618 aa, Corynebacterium glutamicum
  MOD_RES (575): Val, Ala, Asp or Gly
  MOD_RES (577): Phe, Ser, Tyr or Cys
  MOD_RES (582): Ser, Pro, Thr or Ala
MGRAVGIDLGTTNSVVSVLEGGEPVVIANAEGSRTTPSVVAFAKNGEVLVGQSAKNQAVTNVDRTIRSVKRHIGTDWSVAIDDKNYTSQEISARTLMKLKRDAEAYLGEDVTDAVITVPAYFEDSQRQATKEAGQIAGLNVLRIVNEPTAAALAYGLEKGEQEQTILVFDLGGGTFDVSLLEIGDGVVEVRATSGDNELGGDDWDQRIVDWLVEKFQSSNGIDLTKDKMALQRLREAAEKAKIELSSSQSANINLPYITVDADKNPLFLDETLSRAEFQRITQDLLARTKTPFNQVVKDAGVSVSEIDHVVLVGGSTRMPAVTELVKELTGGREPNKGVNPDEVVAVGAALQAGVLRGEVKDVLLLDVTPLSLGIETKGGVMTKLIERNTTIPTKRSETFTTAEDNQPSVQIQVFQGEREIATANKLLGSFELGGIAPAPRGVPQIEVTFDIDANGIVHVTAKDKGTGKENTITIQDGSGLSQDEIDRMIKDAEAHADEDKKRREEQEVRNNAESLVYQTRKFVEENSEKVSEDLKAKVEEAAKGVEEALKGEDLEAIKAAVEKLNTESQEMGKXIXEADAXAGATQADAGAEGAADDNVVDAEVVEDDAADNGEDKK

SEQ ID NO: 35 - DNA, 1947 bp, Corynebacterium glutamicum
  CDS (101)..(1924): RXN02280
cgcgattgcgtcatcgatcgttgttgcttccatgcgcaccacactatctttctgcacgccctgatgccctgtggattcaaaactgtgcttttataggcgtatgcaagaatcctcacgtgataatttccaagttgacctcggcggcgttgttgatcttttgagtcgccacatttattccggtccgagggtgtatgtgcgtgagttgctgcagaatgcggttgatgcttgtactgcacgttctgaacagggtgaggagggctacgagccgagtattcgtattcggccggtgaccaaggatcgtgccacgttttcactggttgataatggtacgggcctgaccgcgcaggaggcgcgggaattgctggcgacggtggggcggacgtcgaaacgcgatgaattcggtctgcagcgggaaggtcgcctggggcaatttggcatcgggctgcttagttgtttcatggtggcggatgagatcaccatggtgtcgcatgcggagggtgcgtcggcgattcggtggactggtcatgcggatggcacctttaacctggagattcttggggatgacgcaacggatgtcattccggtgggcacgactgtgcacctgactccgcgccctgatgagcgcacgttgctgacggaaaattccgtggtcaccattgctagtaattatggccgctacctgccgattcctattgtggtgcagggtgagaaaaacaccaccatcactacatcgccggtgtttgcaaaggatactgatcagcagcacaggctgtatgccggccgggagcgccttggtaaaactccttttgatgtcatcgatctcaccggtcctggcatcgagggtgtggcttatgtattgccggaggcccaggctccgcatatgtccaggcgtcacagtatttatgtcaaccgcatgttggtctctgatgggccttccacggtgctgcccaactgggcgttctttgtggaatgtgaaatcaattcaaccgatttggaacccaccgcatcgcgtgaagcgctcatggatgacaccgcgttcgcggcaaccagggaacatatcggtgagtgcattaaatcgtggctgattaatctcgccatgaccaagcctcaccgcgtgcgggaatttactgcgattcatgatcttgccctgcgcgagctgtgccaatcggacgcggacctggctgaaaccatgttgggtcttctcaccttggagacctcccgtggtcgcatctcgatcggtgagatcaccacgttgtccatcaccgaggatgtgtcgctgcagctggctaccacgttggatgatttcaggcagctcaacaccattgcgcgcccggacaccttgattattaatggcggctacattcacgacagcgatctggctcggctcattcccgttcactacccaccgcttacggtatctactgctgacctgcgcgaatccatggatctgatggagcttccgccgctgcaggacattgagaaagccaaggcactggatgcgcaggtcacggaatcattgaaggattttcagatcaagggcgcaacgagggtttttgaacccgcagatgttcctgccgtggtgatcattgattccaaggcgcaggcctcacgggatcgcaatgaaacacaaagcgcaaccactgatcgttgggctgacattttggcaacggtggataacacgttgagccgtcaaacagccaacattccacaggatcagggactgtcggcgttgtgcttgaattggaacaattcgctggtcaggaaattggcgtccactgatgacaccgccgtggtgtcgcgcacggtgcgtttgctctacgttcaggcattgttgtccagcaagaggccactgcgggtgaaggaacgcgcgctgcttaatgattcgctggcagatctggtttctttgtctttgtcatccgatatctaagacaatcctccgctaatctt

SEQ ID NO: 36 - protein, 608 aa, Corynebacterium glutamicum
MQESSRDNFQVDLGGVVDLLSRHIYSGPRVYVRELLQNAVDACTARSEQGEEGYEPSIRIRPVTKDRATFSLVDNGTGLTAQEARELLATVGRTSKRDEFGLQREGRLGQFGIGLLSCFMVADEITMVSHAEGASAIRWTGHADGTFNLEILGDDATDVIPVGTTVHLTPRPDERTLLTENSVVTIASNYGRYLPIPIVVQGEKNTTITTSPVFAKDTDQQHRLYAGRERLGKTPFDVIDLTGPGIEGVAYVLPEAQAPHMSRRHSIYVNRMLVSDGPSTVLPNWAFFVECEINSTDLEPTASREALMDDTAFAATREHIGECIKSWLINLAMTKPHRVREFTAIHDLALRELCQSDADLAETMLGLLTLETSRGRISIGEITTLSITEDVSLQLATTLDDFRQLNTIARPDTLIINGGYIHDSDLARLIPVHYPPLTVSTADLRESMDLMELPPLQDIEKAKALDAQVTESLKDFQIKGATRVFEPADVPAVVIIDSKAQASRDRNETQSATTDRWADILATVDNTLSRQTANIPQDQGLSALCLNWNNSLVRKLASTDDTAVVSRTVRLLYVQALLSSKRPLRVKERALLNDSLADLVSLSLSSDI

SEQ ID NO: 37 - DNA, 436 bp, Corynebacterium glutamicum
  CDS (101)..(436): FRXA02282
cgcgattgcgtcatcgatcgttgttgcttccatgcgcaccacactatctttctgcacgccctgatgccctgtggattcaaaactgtgcttttataggcgtatgcaagaatcctcacgtgataatttccaagttgacctcggcggcgttgttgatcttttgagtcgccacatttattccggtccgagggtgtatgtgcgtgagttgctgcagaatgcggttgatgcttgtactgcacgttctgaacagggtgaggagggctacgagccgagtattcgtattcggccggtgaccaaggatcgtgccacgttttcactggttgataatggtacgggcctgaccgcgcaggaggcgcgggaattgctggcgacggtggggcggacgtcgaaacgcgatgaattcggtctgcagcgggaaggtcgcctggggcaatttggc

SEQ ID NO: 38 - protein, 112 aa, Corynebacterium glutamicum
MQESSRDNFQVDLGGVVDLLSRHIYSGPRVYVRELLQNAVDACTARSEQGEEGYEPSIRIRPVTKDRATFSLVDNGTGLTAQEARELLATVGRTSKRDEFGLQREGRLGQFG

SEQ ID NO: 39 - DNA, 1269 bp, Corynebacterium glutamicum
  CDS (101)..(1246): RXA00886
taagtatgttggtcgtgtgctcgctggcgaatagctgcgggtatagttggccatttgttttgattaatctgtttagaagctaaaggaagtatcacccaccgtggcacgtgactattacggcattctcggcgtcgatcgcaatgcaaccgaatcagagatcaaaaaggcataccgaaagcttgcccgcaaataccacccggacgtaaacccaggtgaggaagcagcggagaaattccgcgaggcttctgttgcgcatgaggtactcactgatccggataagcgccgcattgttgatatgggcggtgacccaatggagcaaggcggcggagctggcgctggtggcttcggtggaggcttcggcggcagcggtggactgggcgatatcttcgatgccttcttcggcggtggcgcgggcggttcccgtggaccacgttcccgcgtgcagccaggcagtgacaccttgtggcgcacctccatcaccttggaagaggcttacaagggcgctaagaaagatctcacccttgacaccgcagtgctgtgtaccaagtgtcatggttctggatctgcatccgacaagaagcctgttacctgtggcacctgtaatggcgctggtgaaattcaggaagtgcagcgcagcttcctgggcaacgtcatgacgtcccgcccatgccacacctgcgatggcaccggtgagatcatcccagatccttgcactgagtgtgcagcagatggtcgtgtgcgtgctcgccgcgacatcgtggccaacatcccagctggcatccagtccggcatgcgcatccgcatggcaggccaaggtgaggttggcgctggtggcggtcctgcgggtgacctctacattgaagtcatggtgcgcccgcacgccatcttcacccgcgatggcgacgatctgcacgccagcatcaaggttccaatgttcgatgcagcgcttggcaccgaattggacgtggaatccctcaccggcgaagaggtgaaaattaccatccctgcaggtactcagcccaacgatgtgatcaccttggatggtgaaggcatgccgaagctgcgcgcagaaggccacggcaacctcatggcgcatgtcgatctatttgtgccaaccgatttggatgaccgcacccgcgaattgcttgaagaaatccgcaaccatcgcagcgacaacgcttccgtgcatcgcgaaggcggagaagaatccggtttctttgacaagctccgaaacaagttccgcaaataatgtcactgccagtatttatc

SEQ ID NO: 40 - protein, 382 aa, Corynebacterium glutamicum
VARDYYGILGVDRNATESEIKKAYRKLARKYHPDVNPGEEAAEKFREASVAHEVLTDPDKRRIVDMGGDPMEQGGGAGAGGFGGGFGGSGGLGDIFDAFFGGGAGGSRGPRSRVQPGSDTLWRTSITLEEAYKGAKKDLTLDTAVLCTKCHGSGSASDKKPVTCGTCNGAGEIQEVQRSFLGNVMTSRPCHTCDGTGEIIPDPCTECAADGRVRARRDIVANIPAGIQSGMRIRMAGQGEVGAGGGPAGDLYIEVMVRPHAIFTRDGDDLHASIKVPMFDAALGTELDVESLTGEEVKITIPAGTQPNDVITLDGEGMPKLRAEGHGNLMAHVDLFVPTDLDDRTRELLEEIRNHRSDNASVHREGGEESGFFDKLRNKFRK

SEQ ID NO: 41 - DNA, 1470 bp, Corynebacterium glutamicum
  CDS (101)..(1447): RXS00568
gtttcggacgacgcgagaaatcgcattaatcgtcggaaaccgggcttgtttttgtaatatctgaaactttccctttcccgatcatccaggagatttactcgtgaagagttctgtcgagaagctgagcgacacccgttcaaagatcaccgttgaggttccattttctgaactgaagccagagatcgaccaggcatacgccgctctagcgcagcaagtccagatccctggtttccgtaagggcaaggcaccgcgtcagcttatcgacgcacgcttcggccgtggtgcggttctggagcaggttgtcaacgacatgcttcctaaccgctacgcacaggcaatcgaagctgagggcatcaaggcaatcggccagcctaacgtagaggtcaccaagatcgaagacaacgagctcgttgagttcgtcgctgaggttgacgttcgcccagagttcgagcttcctaagttcgaggacatcactgttgaggtcccagctatcaaggctgacgaagaggcaatcgaagcagagctcgagaccctgcgtgcacgtttctccaccttgaaggatcacaaccacaagctgaagaagggtgagttcgtcaccatcaacatcaccgcaagcattgacggtgagaagattgaagaggcaaccactgagggtctgtcctacgaaatcggatctgacgatctgattgacggcctggacaaggctctgatcggcgctaagaaggatgaaaccgtagagttcacctctgagctggcaaacggcgagcacaagggcaaggaagctcaaatcagcgttgagatcaccgcaaccaagcagcgcgagctgcctgagctggatgatgagttcgcacagctggcttctgagttcgacaccatcgaagagcttcgtgagtccaccgtgtctgacgttgaggctaagcagaagaacgagcaggctgctgcaatccgcgacgaagttctcgctgcggctcttggcgaggctgacttcgctctgccacagtccatcgttgacgagcaggcacactcccagctgcaccagctcctcggcgagcttgcacacgacgatgctgcactgaactccctccttgaggctcagggcaccactcgtgaagagttcgacaagaagaacgtcgaagatgctgagaaggctgttcgcacccagctgttcctggacaccctctctgaggttgaggagcctgaggtttcccagcaggagctcaccgaccacatcctgttcaccgcacagtcttacggcatggacccaaaccagttcatcggtcagctgcagcagtccggccagatcgcgaacctcttctccgacgttcgccgtggcaaggctcttgcacaggctatctgccgcgtaaacgtgaaggactccgagggtaacgagatcgaccctaaggaatacttcggtgaagaagaagtagctgagactgagtctgaagcttaaaaactttaaagaaataacgc

SEQ ID NO: 42 - protein, 449 aa, Corynebacterium glutamicum
VKSSVEKLSDTRSKITVEVPFSELKPEIDQAYAALAQQVQIPGFRKGKAPRQLIDARFGRGAVLEQVVNDMLPNRYAQAIEAEGIKAIGQPNVEVTKIEDNELVEFVAEVDVRPEFELPKFEDITVEVPAIKADEEAIEAELETLRARFSTLKDHNHKLKKGEFVTINITASIDGEKIEEATTEGLSYEIGSDDLIDGLDKALIGAKKDETVEFTSELANGEHKGKEAQISVEITATKQRELPELDDEFAQLASEFDTIEELRESTVSDVEAKQKNEQAAAIRDEVLAAALGEADFALPQSIVDEQAHSQLHQLLGELAHDDAALNSLLEAQGTTREEFDKKNVEDAEKAVRTQLFLDTLSEVEEPEVSQQELTDHILFTAQSYGMDPNQFIGQLQQSGQIANLFSDVRRGKALAQAICRVNVKDSEGNEIDPKEYFGEEEVAETESEA

SEQ ID NO: 43 - DNA, 826 bp, Corynebacterium glutamicum
  CDS (101)..(826): RXN03038
gcgcggaaaacaccaagtaagccttacagtccgacagcctcatagcggatgggataagttccaaacacgttcaaatccgttaaagtgcctgtttaaaactatgcattcaaaggaagagttaacagtgcgtaaaggaatttcccgcgtcctctcggtagcggttgctagttcaatcggattcggaactgtactgacaggcaccggcatcgcagcagctcaagactctgcatttgactacggtatggatccaaacatgaactacaacccgatcgatgacatcaaggatcgtcccgaaggattgtccaatcttccctacttcggaagtaaattgaccagctggggctcatcatatgccaccgcctcatccggcgtcgtgacctccgcgctcccgcagtacaccgatccgcgctaccccctcggcaaagacgacctgcccaaggcaaccatcgacatggagccagaagttcttgcgcgccttgagcgattcgtcggcgttgacggtgatcgcatccgccaaatcaacgcgtactcgccatcaatgggacgcaccattcctctagtctgggttgttccagaagacaacaccgtgcctggcccaacggtctacgcactcggaggcggtgacggtggacaaggcggccagaactgggtcacccgcaccgaccttgaggaattaaccagtgacaacaacatcaacctcatcatgccgatgctcggatcttttagtttctactctgactgggcacgcgaaagccaatccatgggttgtgcgcaacagtgggaaacattgctcatgcacgaactgcctgagccgcttgtagcggcc

SEQ ID NO: 44 - protein, 242 aa, Corynebacterium glutamicum
MHSKEELTVRKGISRVLSVAVASSIGFGTVLTGTGIAAAQDSAFDYGMDPNMNYNPIDDIKDRPEGLSNLPYFGSKLTSWGSSYATASSGVVTSALPQYTDPRYPLGKDDLPKATIDMEPEVLARLERFVGVDGDRIRQINAYSPSMGRTIPLVWVVPEDNTVPGPTVYALGGGDGGQGGQNWVTRTDLEELTSDNNINLIMPMLGSFSFYSDWARESQSMGCAQQWETLLMHELPEPLVAA

SEQ ID NO: 45 - DNA, 653 bp, Corynebacterium glutamicum
  CDS (1)..(630): RXN03039
  modified_base (591): a, c, g, t, unknown or other
gcactcccgcaatacaccgacccacgctaccccctcggcaaagacgacctgcccaaagcaaccatcgacatggagccagaagctcttgcgcgccttgagcgattcgtcggcgttgacggtgatcgcatccgccaaatcaacgcgtactcgccatcaatgggacgcaccattcctctagtctgggtcgtgccagaagacaacaccgtgcctggcccaacggtctacgcactcggcggcggcgacggtggccaaggcggccaaaactgggtcacccgcaccgaccttgatgagttgaccagtgaaaacaacatcaacctcatcatgcccatgctcggatcttttagtttctacgctgactgggcaggcgaaagcgaatccatgggtggtgcgcaacagtgggaaacattcctcatgcacgaactrccmgagccgctagaagcggccatcggcgcagacgggcaacgcagcatcgtcggcatgtccatgtccgggggatcrgtgctgaactttgcgacgcatgaccccaacttttaytcctckgtcggctcattttctggatgtgccgaaaccaactcctggatgggrcgccgntggcatcgcagccactgcctacaacggcaatgtcgtgcctgagcaaatctttggtgaagtag

SEQ ID NO: 46 - protein, 210 aa, Corynebacterium glutamicum
ALPQYTDPRYPLGKDDLPKATIDMEPEALARLERFVGVDGDRIRQINAYSPSMGRTIPLVWVVPEDNTVPGPTVYALGGGDGGQGGQNWVTRTDLDELTSENNINLIMPMLGSFSFYADWAGESESMGGAQQWETFLMHELPEPLEAAIGADGQRSIVGMSMSGGSVLNFATHDPNFYSSVGSFSGCAETNSWMGRRWHRSHCLQRQCRA

SEQ ID NO: 47 - DNA, 432 bp, Corynebacterium glutamicum
  CDS (101)..(409): RXN03040
  modified_base (25): a, c, g, t, unknown or other
  modified_base (108): a, c, g, t, unknown or other
  modified_base (395): a, c, g, t, unknown or other
  modified_base (429): a, c, g, t, unknown or other
attactctcgctataacgatccttntgctcaacgctgcgaagctcgaagaacaagacaacctctacatcttcgccggttccggtgtgttctctgaactagatgtcatncggtgacaacgcaccgattgatgaggatgcgttcaaaaaccgcgtcttggttgggtttgaaatcgaagctatgtccaacacctgcacccataacctcaaggctgcgaccgatcaaatgggcatcgacaacatcaactacgatttccgaccaaccggaacccacgcctgggattactggaacgaagcgctccaccgcttcttcccgttgatgatgcagggcttcggcctcgacggtggtcccatcccgatctataaccctaacggtgtgacctccagcgagtcttctntcagaactgtcttctgatgtgagccttggcaccngtg

SEQ ID NO: 48 - protein, 103 aa, Corynebacterium glutamicum
  MOD_RES (3): Phe, Ser, Tyr or Cys
  MOD_RES (99): Phe, Leu, Ile or Val
MSXGDNAPIDEDAFKNRVLVGFEIEAMSNTCTHNLKAATDQMGIDNINYDFRPTGTHAWDYWNEALHRFFPLMMQGFGLDGGPIPIYNPNGVTSSESSXRTVF

SEQ ID NO: 49 - DNA, 835 bp, Corynebacterium glutamicum
  CDS (101)..(835): RXN03051
acatccagaagtagtcgttgagtatcacgagcaagtcaacgatagtaaagataatgtcgaggaactcccgctgcctaagcgggacatagttgcaggggacatgcgttcagatgttatcgagttaccggagggggtaagcaaggagaaagctgaccagctagaagttgcggaagcgcgacttaacgagggtgcacgactgatggcaaccaccgggtgtgaggttatgtggccaacgggcttctcagtttgtggccgaattcttgacacctatcgccaggttggaggtcagttgtcatggcttgggccaccgaagtcaaacgagttgaccaatcccgacggtgttggcaaaagaagtgaattttttggtggagccatctattggcacccagacacaggcgcttatgcagtgaccttggacggtttgcgacagtgggggaccttgaactgggaatcagggccattggggtacccaacctctggtccgatggatacaaactatccccttactcagcgacagacttttcaaggtggtgacaactactacaacccattgactggcggtgctgtgtggggcgatattaaacagcgctacgaagaacttggcggctcgaatcatgccattggcatcccgatcactaatgagctacctagcggtactgagtatttttacaataatttctccaatggaacaatttcgtggcgaaatgatcgtcagacacggtttatgtatttggctacgcagcgggtgtgggatgcgttgggtcgggagacgggtcgtttaggttttcctgaagcagatgaaacacctgaggtttctggtctattccatgtggcg

SEQ ID NO: 50 - protein, 245 aa, Corynebacterium glutamicum
MRSDVIELPEGVSKEKADQLEVAEARLNEGARLMATTGCEVMWPTGFSVCGRILDTYRQVGGQLSWLGPPKSNELTNPDGVGKRSEFFGGAIYWHPDTGAYAVTLDGLRQWGTLNWESGPLGYPTSGPMDTNYPLTQRQTFQGGDNYYNPLTGGAVWGDIKQRYEELGGSNHAIGIPITNELPSGTEYFYNNFSNGTISWRNDRQTRFMYLATQRVWDALGRETGRLGFPEADETPEVSGLFHVA

SEQ ID NO: 51 - DNA, 1704 bp, Corynebacterium glutamicum
  CDS (101)..(1681): RXN03054
ggtggaaatacgcgcacaacaattttattcacagaacttatgattttttcgggttagggtcagtttgttcacatcaactagtaacgaaaggatcatgtgaatgaaactgttttccaaggctgcaggcgtcattgctgcagcacttcttgttgcaggtggtatagcacctgtggcacaggggcaagctagtcaggtggtcacacctgaagaccaagatgcgtatgttcaacagttccaccacgaagggaataccccacctgtggtagacggggtgggtggctacactgagcaagaaatcgccgagatccacgaggctatccgacaagcccaagaatctggcgcacctaatgaagagctcattccgggtgagatgtggtcagataaggtggagctgccagtaactattgataaagcagccgctgatgaggcagagatagctattgcacagcaacaatctcagccacagacgcgaggccttgctgcggctgcggcgtgtcagacgttttggccgtcacctcatcaggtttgtggtgctattttagagcgctatattcagcagggtgcccagtttgggtggatgttgtttccgagtgaaggccaaacgttaaatcctgatggtcaggggtatcgtcagcggtttatgaatgggtttgtttattggcatccgacaactggtgcgcatgctgttaataattacagtgcgcaggtgtgggagcgtaatgggtgggagtctgggtggatgggttatcccactggtggtgaagtccctgtgaatggttccaatccgattgatggtgagttgagtgggtgggtgcaaactttccaaggtgggcgagtgtatcgcagtccggtattggacggtttccaggtggccagtattaatgggctgatcttggataaatggcttgaattgggtggtcctgatagtgaccttggttttcccattgcggatgaggctgtgacagctgacggtgtgggtagattttctgttttccagaacggagttgtctactggcatccgcaacacggagctcaccctatattagggaatatatacagtatctggagagaagaaggagctgagagtggggaattcggttaccctatcggcgatccagaaaagtatacagaaaacatggctaatcaggtattcgaaaaaggcgaacttgcagctaacctataccccaatcctcttgaggcttttattgagtttttaccctttgctaatcttgaggaagcaatagagtattttgagaacggattgtcaaattctcgtgtagaggcgaattcacttaacgccaagaaagattcgattcaatgtcaatcgcaatccgctaacattcatgtgagaacgaagagtgacggagtcgggattagggttccaaagattgggtttaaggctaggatggattgcgaccttcctggaactgtctcagatgtagtggggtatggatggatttactacgactattggggacgatgggctcaagcagcatatgcacaacaattcttcggtaataggaattctgttgtgcaaaccaatttagaggcgggttgcagcggggagaagaatacattattttggggtacttcatattttcaggtgacttatgaaggtcagccgtatttcggtcagtcagcaactaattacgcttatcttccgtgtacgatagaccgtagttaacataaggaatggaataggag

SEQ ID NO: 52 - protein, 527 aa, Corynebacterium glutamicum
MKLFSKAAGVIAAALLVAGGIAPVAQGQASQVVTPEDQDAYVQQFHHEGNTPPVVDGVGGYTEQEIAEIHEAIRQAQESGAPNEELIPGEMWSDKVELPVTIDKAAADEAEIAIAQQQSQPQTRGLAAAAACQTFWPSPHQVCGAILERYIQQGAQFGWMLFPSEGQTLNPDGQGYRQRFMNGFVYWHPTTGAHAVNNYSAQVWERNGWESGWMGYPTGGEVPVNGSNPIDGELSGWVQTFQGGRVYRSPVLDGFQVASINGLILDKWLELGGPDSDLGFPIADEAVTADGVGRFSVFQNGVVYWHPQHGAHPILGNIYSIWREEGAESGEFGYPIGDPEKYTENMANQVFEKGELAANLYPNPLEAFIEFLPFANLEEAIEYFENGLSNSRVEANSLNAKKDSIQCQSQSANIHVRTKSDGVGIRVPKIGFKARMDCDLPGTVSDVVGYGWIYYDYWGRWAQAAYAQQFFGNRNSVVQTNLEAGCSGEKNTLFWGTSYFQVTYEGQPYFGQSATNYAYLPCTIDRS

SEQ ID NO: 53 - DNA, 456 bp, Corynebacterium glutamicum
  CDS (101)..(433): RXN02949
actctcgaaggttgaacacagggctgcgattgtgctggatcaaatgtctgcacgaaaaattgttatcgcccctggatgagtagtgatttagaggagtgctgtgagcgacgagcagaattctggcgtaggcggaacgtctcgcccaacgggtaaacgccagctgtcgggtgcttccactacctctacctcttcttatgaggctaagcaggtatctacacagaagaagtcatccggttcggattctaagcctggcggcggtgttatttcttttctgcctgaggttgtgggagaagtccgtaaggttatttggcctactgcgcgccagatggtcacgtacacccttgtcgttttgggattcttgattgttttgaccgctttggtgtctggtgtggatttcctagctggtcttggagttgagaagattctgactccgtaggtaggatgtgtaacatcttt

SEQ ID NO: 54 - protein, 111 aa, Corynebacterium glutamicum
VSDEQNSGVGGTSRPTGKRQLSGASTTSTSSYEAKQVSTQKKSSGSDSKPGGGVISFLPEVVGEVRKVIWPTARQMVTYTLVVLGFLIVLTALVSGVDFLAGLGVEKILTP

SEQ ID NO: 55 - DNA, 1941 bp, Corynebacterium glutamicum
  CDS (101)..(1918): RXN02462
tccatcctcatcgacgaagcccgcaccccactgattatctccgggaccagtagacggcacatcgcagttctacaacgtcttcgcacagatcgtcccacgcatgaccaaggacgttcactacgaagtcgacgaacgtaaaaagaccgtcggtgtgaaagaagaaggcgtcgaatacgtcgaagaccaactcggcatcgacaacctctacgcacctgagcactcacagctggtcagctacctgaacaacgccatcaaggcacaggaactgttcacccgcgacaaggactacatcgtccgcaacggcgaagttatgatcgtcgacggcttcaccggccgtgtccttgccggccgccgatacaacgaaggcatgcaccaggcgatcgaagccaaagagcgcgtagagatcaaaaacgagaaccagaccctggcgaccgttaccctccagaactacttccgcctctacaccaaactcgccggcatgaccggtaccgcagagaccgaagcagcagagctcaaccagatctacaagctcgacgtcatcgcgatcccaaccaaccgaccaaaccagcgcgaagacttgaccgacttggtgtacaaaacccaagaggctaagttcgcagcagtcgtcgacgacatcgcagaacgcaccgaaaagggccaaccagtcctcgtcggtaccgtctccgtcgagcgctccgaatacctctcccagctgttgaccaaacgaggcatcaagcacaacgtcctcaatgcgaagcaccacgagcaggaagcacagatcgttgctcaggcaggtcttccaggcgccgtcaccgttgccaccaacatggcgggccgtggaaccgacatcgtgctcggcggaaacccagaaatcctcctcgacatcaaactccgcgaacgtggacttgatcctttcgaagacgaagaaagctaccaggaagcctgggacgctgaacttccagcaatgaagcagcgatgcgaagaacgtggcgacaaagtccgcgaagccggaggactctacgtccttggcaccgaacgccacgaatcccgacgcatcgacaaccagctgcgcggtcgttctgcacgtcagggcgacccaggatccacccgcttctatctctctatgcgcgacgacctgatggttcgcttcgtcggcccaaccatggaaaacatgatgaacaggctcaacgtcccagacgatgtgcccatcgaatccaaaaccgtcaccaactccatcaagggcgcccaagctcaggtggagaaccagaacttcgaaatgcgtaagaacgttctgaagtacgacgaagtcatgaacgaacagcgcaaggttatctacagcgagcgacgcgaaatcctcgaatccgcagacatctcccgctacatccaaaacatgatcgaagaaacagtcagcgcatacgtcgacggcgccaccgccaacggctacgtcgaagactgggacctcgacaaactctggaacgccctcgaagccctctacgacccatcgatcaactggaccgacctcgtcgaaggcagcgaatacggcaaaccaggggagctgtccgccgaagatctacgcaccgcactcgtcaacgacgcccacgccgaatacgcaaaactcgaagaagccgtatccgcaatcggcggcgaagcacagatccgcaacatcgaacgaatggtgctcatgccagtcatcgacaccaaatggcgcgaacacctctacgaaatggactacctgaaagaaggcatcggcctgcgcgcaatggcacagcgcgacccactggtcgaataccaaaaggaaggcggcgacatgttcaacggcatgaaagacggcatcaaggaagaaaccgtccgccagctcttcctctccgcaagcagttcatcaagcaagacgcggaagtcgctgactaactcagaaccctgaaattcagcatccgccacatg

SEQ ID NO: 56 - protein, 606 aa, Corynebacterium glutamicum
MTKDVHYEVDERKKTVGVKEEGVEYVEDQLGIDNLYAPEHSQLVSYLNNAIKAQELFTRDKDYIVRNGEVMIVDGFTGRVLAGRRYNEGMHQAIEAKERVEIKNENQTLATVTLQNYFRLYTKLAGMTGTAETEAAELNQIYKLDVIAIPTNRPNQREDLTDLVYKTQEAKFAAVVDDIAERTEKGQPVLVGTVSVERSEYLSQLLTKRGIKHNVLNAKHHEQEAQIVAQAGLPGAVTVATNMAGRGTDIVLGGNPEILLDIKLRERGLDPFEDEESYQEAWDAELPAMKQRCEERGDKVREAGGLYVLGTERHESRRIDNQLRGRSARQGDPGSTRFYLSMRDDLMVRFVGPTMENMMNRLNVPDDVPIESKTVTNSIKGAQAQVENQNFEMRKNVLKYDEVMNEQRKVIYSERREILESADISRYIQNMIEETVSAYVDGATANGYVEDWDLDKLWNALEALYDPSINWTDLVEGSEYGKPGELSAEDLRTALVNDAHAEYAKLEEAVSAIGGEAQIRNIERMVLMPVIDTKWREHLYEMDYLKEGIGLRAMAQRDPLVEYQKEGGDMFNGMKDGIKEETVRQLFLSASSSSSKTRKSLTNSEP

SEQ ID NO: 57 - DNA, 1965 bp, Corynebacterium glutamicum
  CDS (101)..(1942): RXN01559
gtctggttgattggaattgaaggagactttcttggctcggcaaaaaaagagtgccgctagcgcctgggaacgatggccaaaacgcgcaatagcgttgtttgtgctcatcgtcgttggtgtttatgcgttggtgctgttgacaggcgatcgttctgccacaccaaaattgggtattgatctgcaaggcggaacccgagtgaccctcgtgccgcaggggcaggatccaactcaggaccagctgaatcaggcacgcaccattctggaaaaccgtgtgaacggcatgggcgtttcaggtgcaagcgtggtcgctgacggtaacacgctggtgatcactgttcccggggaaaataccgcacaggcgcaatccctaggacagacctcccagctgctgttccgtcccgttggtcaggcaggaatgcccgatatgaccacgttgatgccagagctggaagagatggccaacaggtgggttgaatacggcgtcatcaccgaagagcaggcaaatgcctccttggaggaaatgaacaccgctgttgcatcgaccactgcggtggaaggcgaagaagcaactgagccagaacccgtcaccgtgtcggcgacccctatggatgagccagccaactccattgaggcaacacagcgacgccaggaaatcacggacatgctgcgcaccgaccgccagtccaccgatcccactgtccagatcgctgcaagttctttgatgcagtgcaccactgatgagatggatcctttggccggcaccgatgatccacgcctgccattggtggcatgtgatccagctgtaggtggcgtgtatgtacttgatcctgcacctttgctcaacggcgaaaccgatgaggaaaatggtgcgcgcctaaccggtaatgagatcgataccaaccgtcccatcaccggtggattcaacgcccagtccggccagatggaaatcagctttgccttcaaatccggcgatggggaagaaggctctgcaacttggtcctctctgaccagccagtacctgcagcagcagatcgccatcaccctggactctcaggtgatttctgcacccgtgattcagtcagcaacccctgtgggttctgcaacatccatcaccggtgacttcactcaaactgaagcccaagatctggcgaacaacctgcgctacggtgcattgcccctgagcttcgcaggtgaaaacggcgagcgcggcggaactaccaccaccgttccgccatcactaggcgcagcatccttgaaggccggactgatcgcaggcatcgtcggcatcgcgctggtcgccatcttcgtgttcgcctactaccgcgtcttcggattcgtttccctgttcaccctgtttgccgcaggcgtgttggtctacggccttctggtactgctgggacgctggatcggatattccctagaccttgctggtatcgccggtttgatcatcggtatcggtaccaccgccgactccttcgtggtgttctatgagcgcatcaaggatgagatccgtgaaggaagatcctttagatctgcagtacctcgtgcatgggaaagcgccaagcgcaccatcgtcacaggcaacatggtcactttgctcggcgctatcgtgatttacttgctcgcggtcggcgaagtcaagggctttgccttcaccctgggtctgaccaccgtattcgatctcgttgtcaccttcctgatcacggcaccactggttatcctggcatcacgcaacccattctttgccaagtcatcggtcaacggcatgggacgagtgatgaagctcgttgaagaacgccgcgccaacggtgaattggatgagcctgagtacctgaaaaagatccatgccaagaatgcggcagctgataaggcttccactgacaattcttccactgacaattctgaagcacctggcaccgatacgaaccaagaggaggagaagtagccatgactgattcccagact

SEQ ID NO: 58 - protein, 614 aa, Corynebacterium glutamicum
VLIVVGVYALVLLTGDRSATPKLGIDLQGGTRVTLVPQGQDPTQDQLNQARTILENRVNGMGVSGASVVADGNTLVITVPGENTAQAQSLGQTSQLLFRPVGQAGMPDMTTLMPELEEMANRWVEYGVITEEQANASLEEMNTAVASTTAVEGEEATEPEPVTVSATPMDEPANSIEATQRRQEITDMLRTDRQSTDPTVQIAASSLMQCTTDEMDPLAGTDDPRLPLVACDPAVGGVYVLDPAPLLNGETDEENGARLTGNEIDTNRPITGGFNAQSGQMEISFAFKSGDGEEGSATWSSLTSQYLQQQIAITLDSQVISAPVIQSATPVGSATSITGDFTQTEAQDLANNLRYGALPLSFAGENGERGGTTTTVPPSLGAASLKAGLIAGIVGIALVAIFVFAYYRVFGFVSLFTLFAAGVLVYGLLVLLGRWIGYSLDLAGIAGLIIGIGTTADSFVVFYERIKDEIREGRSFRSAVPRAWESAKRTIVTGNMVTLLGAIVIYLLAVGEVKGFAFTLGLTTVFDLVVTFLITAPLVILASRNPFFAKSSVNGMGRVMKLVEERRANGELDEPEYLKKIHAKNAAADKASTDNSSTDNSEAPGTDTNQEEEK

SEQ ID NO: 59 - DNA, 819 bp, Corynebacterium glutamicum
  CDS (101)..(796): RXN00046
tggtgcccaagcagccgtcatcgcagcagcaaaatatgcccgcgataacgccttttaagcacctaaaacgctgttctcaacacaggagtttccttaaataatggacttaaatactcaacgctcaaagctctacgcacagcttcaaggccagctcattgtttccgtgcaagctcccgacggccatgccatgcgagatacccatacgctcacccatgtggccgcagcctgtgtcgatggcggtgctcctgccattcgctgtggcggttacggcggtttggaagatatccgttcaatctccaaccgtgtcgacgttcccgttttcggactcaccaaagaaggctccgaaggagtttacatcaccccaaccagggattccgttcgagcagtggcagaatccggcgccactgtagtctgcgcggatgcaactttccgacctaggcctgacggctccacctttgcagagctggtcactgttgcccacgattccggaattctcatcatggcggactgcgcaactcccgaagaagttctcagtgcgcataaggctggcgcggattttgtgtccaccacgcttgctggatacaccgaacaccgcgagaaaacagtcggtccagatttcgattgcctccgcgaagcacgtgagttagttcccgatgcgttcctcattggcgaaggtcgcttctccaaccctgcggatgtggcgcacggtcgtctcattggtgccaacgcgatcatcgtgggcaccgcaatcactgaccctggtttcatcactggacagttcgcgtcactgttgcactagcacttagtccagcgctgcac

SEQ ID NO: 60 - protein, 232 aa, Corynebacterium glutamicum
MDLNTQRSKLYAQLQGQLIVSVQAPDGHAMRDTHTLTHVAAACVDGGAPAIRCGGYGGLEDIRSISNRVDVPVFGLTKEGSEGVYITPTRDSVRAVAESGATVVCADATFRPRPDGSTFAELVTVAHDSGILIMADCATPEEVLSAHKAGADFVSTTLAGYTEHREKTVGPDFDCLREARELVPDAFLIGEGRFSNPADVAHGRLIGANAIIVGTAITDPGFITGQFASLLH

SEQ ID NO: 61 - DNA, 1219 bp, Corynebacterium glutamicum
  CDS (48)..(1196): RXN01863
ggtatcataccgatatgaaccaaatagaaagaaggaagtttaagacgatgaatagcgtcaaattgaagcaacctgttagcatttacaatgatccatgggaatcatataacgatgttaaagaacatggccaattaactttaagtaacatcgaatttacaactacaaatctttgtaatatgcgttgtagccactgtgcagttggttatactttacaaactgtcgaccccgagcctttagatatggacttaatttatcgtagacttgatgaaattccaaatctgcgaacgatgtcaattacaggtggcgaaccaatgttttctaaaaagtctattagaaatgttgttaaacctctattaaagtatgcacatcatcgaggtatatatacacaaatgaattcaaacctaacattgcctcaagatcgttatttagatattgctgaatatatcgatgttatgcatatctcacataactggggaacaactgatgaattcgcaaatgttggctttggcgcaatgaagaagcaaccaccgttaaaagctaagttaaaattatatgaacaaatgatttcgaatgcacgtacattatcagaacaaggaatgtttgtatctgcggaaacaatgctcaatcaaagtacgctaccacatttacgaaaaatacatcaagaagtcgttcatgatatgaaatgtagcagacacgagattcaccctatgtatccagctgactttgcaagtcaattaaatgtgttaactctagcggaaatgaaaaagacaattcatgatatattggatttcagagatgaagatatttggatgttatttggtactttgcctgtgtttccatgcttaaaggatgatgaagatcaaaagttactatcacgtttaagaaatgctaacaatgtaacgactagaaatgacccggatggccgtagtcgtttaaatgtcaatgtatttacaggtaatgtaatcgtaactgatttcggagatgaaacaggtacaatttcgaatatacaaaaagataaattaacagatgtatttgataaatggttatcctctgatcttgctaaatcattaaattgtcattgttccgagtttagttgtttaggaccaaatgttcttgttaaaaatatgtactatccgaatatggattttaaagataatgagcgtcatatgcacaaacaaccacaaattatacaattttaaaaactcttaattatgcggag

SEQ ID NO: 62 - protein, 383 aa, Corynebacterium glutamicum
MNSVKLKQPVSIYNDPWESYNDVKEHGQLTLSNIEFTTTNLCNMRCSHCAVGYTLQTVDPEPLDMDLIYRRLDEIPNLRTMSITGGEPMFSKKSIRNVVKPLLKYAHHRGIYTQMNSNLTLPQDRYLDIAEYIDVMHISHNWGTTDEFANVGFGAMKKQPPLKAKLKLYEQMISNARTLSEQGMFVSAETMLNQSTLPHLRKIHQEVVHDMKCSRHEIHPMYPADFASQLNVLTLAEMKKTIHDILDFRDEDIWMLFGTLPVFPCLKDDEDQKLLSRLRNANNVTTRNDPDGRSRLNVNVFTGNVIVTDFGDETGTISNIQKDKLTDVFDKWLSSDLAKSLNCHCSEFSCLGPNVLVKNMYYPNMDFKDNERHMHKQPQIIQF

SEQ ID NO: 63 - DNA, 618 bp, Corynebacterium glutamicum
  CDS (101)..(595): RXN00833
agctttttgcatgtgtcatatcgtaccgtttgcataggcctgttcgcgcttggtgaaccttttctagcaccaaaacaaaactctccctagtatggggtccatggctaaaacacattttcaaggcaacgaaactgctacctccggcgaactgccacaggtcggcgacaacctcgcagagttcaacctcgtcaacaccgaactgggcgaggtctcctcaaaggacttccagggccgcaagcttgtcctgaacatcttcccatccgttgacaccggcgtttgtgcaacatcagtccgcaagttcaacgaggcagcagcaagcctggaaaacaccaccgtgctgtgcatctccaaggatcttccattcgcactgggccgtttctgctccgcagaaggcatcgagaacgtcaccccagtatccgcattccgttccaccttcggtgaagacaacggcatcgtgctcgaaggctcaccacttaagggtcttcttgcacgcagcgtcatcgtcgtcgatgaaaacggcaaggttgcttacacccagttggttgatgagatcttcactgaacctgattacgacgctgcacttgctgggctgaactaatttacttcgctcaggggaat

SEQ ID NO: 64 - protein, 165 aa, Corynebacterium glutamicum
MAKTHFQGNETATSGELPQVGDNLAEFNLVNTELGEVSSKDFQGRKLVLNIFPSVDTGVCATSVRKFNEAAASLENTTVLCISKDLPFALGRFCSAEGIENVTPVSAFRSTFGEDNGIVLEGSPLKGLLARSVIVVDENGKVAYTQLVDEIFTEPDYDAALAGLN

SEQ ID NO: 65 - DNA, 879 bp, Corynebacterium glutamicum
  CDS (101)..(856): RXN01676
agttacagcttttctcggtggcacactcgcgctacttagcccttgtgccgcactccttttaccagcattttttgcatcctcagtgggtgctggcccgcgcatgatccttcacggtgttgtgttctacgcaggacttctagtacttctcgtgccacttggccttggtgcgggaatcctcggcgagctgtttatcacccaacgccagaccatcatcgtggtttcatcgatcgtgctgattatcctaggttttgtccagatcttcggcggcggattcgacttcggaaaagcactcccaggattagatcgtctgcaatctaaggccactgtgacctcaggtctaggaaagagctttttactaggaatgaccagtagtattgccggtttttgttccggaccaatcctcggcgccgttcttactttggctgccaccagtggaaactccatcacctcagcactcattttgagtgcttatggtgcgggaatggtgctgcccctgatggctattgcagcgctctgggccaaactcggacagcgtggacagcagatgctccgcggccgggaattcaccttcttgggcaggcagtggcacattgtttctgtcattagcggtgccctgatcatcgctgtcggaatcctcttttggtccacgaacggccttgtcagcatgccggagctcgttccaatggacacccagatctggctacaggaagccacattctcactcgggtcaccactctttgacatcgcattgatcattgtcgccgctggcttgttcttgtacttctggaacaaacgacaaaagcgaaaagaagaagctcagcgacccaaagaaagtggatgggttattaaccctcgctaattattagttttggagcgagg

SEQ ID NO: 66 - protein, 252 aa, Corynebacterium glutamicum
MILHGVVFYAGLLVLLVPLGLGAGILGELFITQRQTIIVVSSIVLIILGFVQIFGGGFDFGKALPGLDRLQSKATVTSGLGKSFLLGMTSSIAGFCSGPILGAVLTLAATSGNSITSALILSAYGAGMVLPLMAIAALWAKLGQRGQQMLRGREFTFLGRQWHIVSVISGALIIAVGILFWSTNGLVSMPELVPMDTQIWLQEATFSLGSPLFDIALIIVAAGLFLYFWNKRQKRKEEAQRPKESGWVINPR

SEQ ID NO: 67 - DNA, 744 bp, Corynebacterium glutamicum
  CDS (101)..(721): RXN00380
caggcaatgcgacctcgcctcagtgacatccttggtgttccaagacgatcaaattgtcggcgtgcattacaacgaaccagctcaggagatttgatcactcgtgcgtttgaccaaactagcagcaacaatcggctgcgtgacactcagcggacttgcgctagtagcctgcagcagtgacagtaccgctggtactgacgctgttgctgtcggcggaaccttccaattccactccccggatggaaagatggaaattttctacgacgaggctgaccgtcaacaactccccgacattggtggagattccctcatggaagagggcacacagatcaacctgtctgatttcgaaaaccaagttgtcatcctcaatgcgtgggggcagtggtgtgcaccgtgccgctccgaatccgatgatctccagattatccatgaggaactccaagctgccggaaacggcgacacccctggtggcaccgtgttgggtatcaatgtgcgtgattactcccgcgacatcgcccaagactttgtcaccgacaacggccttgattacccaagcatttacgatccaccatttatgacagcagcatccctcggtggtgttcccgcatcggtgatcccaaccaccatcgtgctggataaacagcaccgccccgcagcagtgttcttgcgcgaagtcacctccaaagatgtgttggatgttgcgttgccattggtagatgaggcctaaatgtctgagattgtggtagc

SEQ ID NO: 68 - protein, 207 aa, Corynebacterium glutamicum
VRLTKLAATIGCVTLSGLALVACSSDSTAGTDAVAVGGTFQFHSPDGKMEIFYDEADRQQLPDIGGDSLMEEGTQINLSDFENQVVILNAWGQWCAPCRSESDDLQIIHEELQAAGNGDTPGGTVLGINVRDYSRDIAQDFVTDNGLDYPSIYDPPFMTAASLGGVPASVIPTTIVLDKQHRPAAVFLREVTSKDVLDVALPLVDEA

SEQ ID NO: 69 - DNA, 495 bp, Corynebacterium glutamicum
  CDS (101)..(472): RXN00937
agctgccggtcaatgaagaaaatccttggccgggaataactacagtccgctgaaagttggtctatatatagaccttacaaatcttgaacggagattcttaatggcaaccatcgatgtaaccgaagaaacatttgagagcacagttaccggcgacggaattgtcctcgtagacgcatgggcatcctggtgcggaccttgccgccagttcgccccaacctacgagaaggtttccgaaacccacaccgacgcaaccttcgccaagcttgataccgaagcaaaccagggcctggctgcagcactgcagatccagtccatcccaactctgatggttttccgcgacggcatcatggtctaccgcgaagccggcaccatgccagctcctgcactggatgatctggtcaaccaggttaaggcactcgacatggatgacgttcgtcgccaggtcgcagagcagcagggttctgcagaggcataagcttccaattgtgttttggt

SEQ ID NO: 70 - protein, 124 aa, Corynebacterium glutamicum
MATIDVTEETFESTVTGDGIVLVDAWASWCGPCRQFAPTYEKVSETHTDATFAKLDTEANQGLAAALQIQSIPTLMVFRDGIMVYREAGTMPAPALDDLVNQVKALDMDDVRRQVAEQQGSAEA

SEQ ID NO: 71 - DNA, 990 bp, Corynebacterium glutamicum
  CDS (101)..(967): RXN02325
cagagatttgaagatggagaccaaggctcaaagggaatccatgccgtcttggtttaatactgcacccgtctaatgaaaatcattactattaggtgtcatgatggaccatgcacacgattcctgctcaccaactctgcgccgtgatttggaggtcactggccagctccaacctgagaaagctgtcgatttagcagcgccgcacgaagggaaggttgccaatataacgaaggtgacctcctcaaatatggagcacaccatcacgcaggcctcaaaagctaaggaggtggtggtgctcattggtcactccctgctgcccacatttcaggatttggaaaaagacattctgcactttcaggcaggtaataaagggcgattttctgtagcgattgttgatcctgatcgcagtgcagatgtggttgccagatttaggccaaaacagattccggtggcatacgtggtgaaagatggcgccagcattgcggagttcaactcgctcaacaaggagccggttgcacaatggcttgatcattttgtgtcgcgggaaacgatccccaatgaaaaagagggggacgtcgataagcaaatagacccgcgcctgtggcgggcagcggaattggtgaacgccggtgattttcgcgcggcgttggcgttgtatgagcagttgccgcaggatgcgacggtgaagcgggcgcacgcggcggtgtcggtattggcgcggatgtctgtggcggatcggggagaggatccgatcgagaagtcgcgccgggatccagacgatgtgaacaaggcgctggcggcggcggatatgtatgtgttgatgaatcagccggacacagcgctcgcgcaccttgcagcactattgccaaaaccggaggctgcccggcggatcgtggagttgctgaacttgtttgatccgctggacctggtcgcattggaaatcagggcgcaggtggggaatgcaatgagctaagaaaacactttaaatattct

SEQ ID NO: 72 - protein, 289 aa, Corynebacterium glutamicum
MDHAHDSCSPTLRRDLEVTGQLQPEKAVDLAAPHEGKVANITKVTSSNMEHTITQASKAKEVVVLIGHSLLPTFQDLEKDILHFQAGNKGRFSVAIVDPDRSADVVARFRPKQIPVAYVVKDGASIAEFNSLNKEPVAQWLDHFVSRETIPNEKEGDVDKQIDPRLWRAAELVNAGDFRAALALYEQLPQDATVKRAHAAVSVLARMSVADRGEDPIEKSRRDPDDVNKALAAADMYVLMNQPDTALAHLAALLPKPEAARRIVELLNLFDPLDLVALEIRAQVGNAMS

SEQ ID NO: 73 - DNA, 900 bp, Corynebacterium glutamicum
  CDS (101)..(877): RXN01837
cccccatcattccctcaaggtgtgaagatacggttaggatagaaaagaatttttttgacgttggacattctcaaaatcaagtagcaagggatcaaactctgtgagtactaataaggaacgacgccaacaggcgctttcccagctggagaaagaaatcaaaagccgggaccgcaaagaaaagaccaagccactaaccgtggtctttgcttccctggctgtcatcctggttgtcgttggcggtatctggtacgcagctacccgcagcaccgaagacgaagtcatcaccgctgatgaaacatccaccaccgcagagacccctgactaccagccactggcgctgacccgcaccaccgcgctcggcgactccgtgacctgtgagtacccagatgctggcgaggcttccaaggatgtctccaagcctgctactgaaaacgtgccagcaaccggcaccgtgaccgtcaacctgaccaccgcccagggcaacatcggcatggaacttgatcgctccgtatccccttgtaccgtcaacgctgttgagcacatggcttccgagggctactacaacgatactgtctgccaccgcatcaccacctctggcatttacgttctccagtgcggcgatccaagcagcaccggcgcaggcggcccagggttcagcttcgccaacgaatacccaaccgacgaagcaactgacctaaccaccccagtcatctacgagcgcggcaccatcgccatggccaacgctggcgctgacaccaacgggctcccagttcttcctcaactacgaggattccccactggcaccgaactacacctacttcggccagatcaccgaagaaggccttgcaaccctcgacgccatcgcagaagttggcactgaaggtggaaccggcgacggag

SEQ ID NO: 74 - protein, 259 aa, Corynebacterium glutamicum
VSTNKERRQQALSQLEKEIKSRDRKEKTKPLTVVFASLAVILVVVGGIWYAATRSTEDEVITADETSTTAETPDYQPLALTRTTALGDSVTCEYPDAGEASKDVSKPATENVPATGTVTVNLTTAQGNIGMELDRSVSPCTVNAVEHMASEGYYNDTVCHRITTSGIYVLQCGDPSSTGAGGPGFSFANEYPTDEATDLTTPVIYERGTIAMANAGADTNGLPVLPQLRGFPTGTELHLLRPDHRRRPCNPRRHRRSWH

SEQ ID NO: 75 - DNA, 741 bp, Corynebacterium glutamicum
  CDS (1)..(741): RXN01926
ctgcgaagcttctacaccccagaacaagccatcgaacgcgaaggcgacgtctggaaagccgccaccgaagaagcagaactcctcgcagctgacggcgccgtccacgaccaggaactcttcctcaactgcaccacctccccactgatcttcgcctccgcgatgctcaacttcggcgtccaccaaatcctggacaccctctgccaactcgcaccatcccccgccggccgcgacgcagaccccaaagccctcgaagccgccacctccgcaatggacgaccaccgcgacaccaccgacgacttctccggcgtcgtcttcaaagtccaagccggcatggacaaaaaccaccgcgataccctcgccttcatgcgcgtcgtctccggcgaattcgaccgcggcatgcaagtcacccactcccaatccggccgcagcttctccaccaaatacgccctcaccgtcttcggccgcacccgctctaccgtcgaaaccgccttccccggcgacatcgtcggcctcgtcaacgccggcgccctcgcaccaggcgacaccatcttcgaaggccgaaaaatccaatacccaccaatgccaaaattcgcgccagaacacttccgcatcctgcgcgccaaatcactcggcaaatacaaacagttccgcaaagccctcgagcagctggactccgaaggtgtcgtccagatcctcaagaacgacctgcgtggcgacgccaacccaggtcatggccggtgt

SEQ ID NO: 76 - protein, 247 aa, Corynebacterium glutamicum
LRSFYTPEQAIEREGDVWKAATEEAELLAADGAVHDQELFLNCTTSPLIFASAMLNFGVHQILDTLCQLAPSPAGRDADPKALEAATSAMDDHRDTTDDFSGVVFKVQAGMDKNHRDTLAFMRVVSGEFDRGMQVTHSQSGRSFSTKYALTVFGRTRSTVETAFPGDIVGLVNAGALAPGDTIFEGRKIQYPPMPKFAPEHFRILRAKSLGKYKQFRKALEQLDSEGVVQILKNDLRGDANPGHGRC

SEQ ID NO: 77 - DNA, 478 bp, Corynebacterium glutamicum
  CDS (101)..(478): RXN02002
aagtggcaaaaaacgtttcaagcaggcaacgccggcgtacaacttcgctgagctggggcgattatggcccagcgcccacaacccgctattcttaatacccatgagcaacgccaattccgacaccaccgccgccgaggcacatcgccgcagaacattcgccgtaatcgcacaccccgacgccggtaaatccaccctcaccgaggcattggcgctgcatgcacacatcatctccgaagccggcgccacccacggcaaagcaggccgcaaagccaccgtttccgactggatggaaatggaaaaagaccgcggcatctccatcgcctcctccgcactccaattcgagtacgcaccagaaggccacgcaggcgagcccttcatgatcaacctcgtggacaccccaggccacgccgacttctccgaagacacctaccgcgtcctcatggccgtcgacgcagcagtcatgcttatgcactccgtc

SEQ ID NO: 78 - protein, 126 aa, Corynebacterium glutamicum
MSNANSDTTAAEAHRRRTFAVIAHPDAGKSTLTEALALHAHIISEAGATHGKAGRKATVSDWMEMEKDRGISIASSALQFEYAPEGHAGEPFMINLVDTPGHADFSEDTYRVLMAVDAAVMLMHSV

SEQ ID NO: 79 - DNA, 1080 bp, Corynebacterium glutamicum
  CDS (101)..(1057): RXN02736
cagaggattacccagcgggtacgtggggtccaaagagcgctgatgaaatgctttcccgcaacggtcacacctggcgcaggccataatttaggggcaaaaaatgatctttgaacttccggataccaccacccagcaaatttccaagaccctaactcgactgcgtgaatcgggcacccaggtcaccaccggccgagtgctcaccctcatcgtggtcactgactccgaaagcgatgtcgctgcagttaccgagtccaccaatgaagcctcgcgcgagcacccatctcgcgtgatcattttggtggttggcgataaaactgcagaaaacaaagttgacgcagaagtccgtatcggtggcgacgctggtgcttccgagatgatcatcatgcatctcaacggacctgtcgctgacaagctccagtatgtcgtcacaccactgttgcttcctgacacccccatcgttgcttggtggccaggtgaatcaccaaagaatccttcccaggacccaattggacgcatcgcacaacgacgcatcactgatgctttgtacgaccgtgatgacgcactagaagatcgtgttgagaactatcacccaggtgataccgacatgacgtgggcgcgccttacccagtggcggggacttgttgcctcctcattggatcacccaccacacagcgaaatcacttccgtgaggctgaccggtgcaagcggcagtacctcggtggatttggctgcaggctggttggcgcggaggctgaaagtgcctgtgatccgcgaggtgacagatgctcccaccgtgccaaccgatgagtttggtactccactgctggctatccagcgcctggagatcgttcgcaccaccggctcgatcatcatcaccatctatgacgctcatacccttcaggtagagatgccggaatccggcaatgccccatcgctggtggctattggtcgtcgaagtgagtccgactgcttgtctgaggagcttcgccacatggatccagatttgggctaccagcacgcactatccggcttgtccagcgtcaagctggaaaccgtctaaggagaaatacaacactatgg

SEQ ID NO: 80 - protein, 319 aa, Corynebacterium glutamicum
MIFELPDTTTQQISKTLTRLRESGTQVTTGRVLTLIVVTDSESDVAAVTESTNEASREHPSRVIILVVGDKTAENKVDAEVRIGGDAGASEMIIMHLNGPVADKLQYVVTPLLLPDTPIVAWWPGESPKNPSQDPIGRIAQRRITDALYDRDDALEDRVENYHPGDTDMTWARLTQWRGLVASSLDHPPHSEITSVRLTGASGSTSVDLAAGWLARRLKVPVIREVTDAPTVPTDEFGTPLLAIQRLEIVRTTGSIIITIYDAHTLQVEMPESGNAPSLVAIGRRSESDCLSEELRHMDPDLGYQHALSGLSSVKLETV

SEQ ID NO: 81 - DNA, 331 bp, Corynebacterium glutamicum
  CDS (101)..(301): RXS03217
tctgtgaaggtagatggtttgacgaggagttccaacgactcggacgctggtgaatcatgctggcgaacgtagcatcacctgattaggaaaaggtacaaatatggcacagggtactgtgaaatggttcaacggcgaaaagggatttggtttcatcgctcccaacgatggctccgcagatctcttcgtccactactctgagattcagggctccggtttccgtaatcttgaggaaaaccagccagttgaatttgaggtcggcgagggcgccaagggcccacaggctcagcaggttcgtgctctctaagctctaactgctagctaaaaattccgc

SEQ ID NO: 82 - protein, 67 aa, Corynebacterium glutamicum
MAQGTVKWFNGEKGFGFIAPNDGSADLFVHYSEIQGSGFRNLEENQPVEFEVGEGAKGPQAQQVRAL

SEQ ID NO: 83 - DNA, 324 bp, Corynebacterium glutamicum
  CDS (101)..(301): FRXA01917
tctgtgaaggtagatggtttgacgaggagttccaacgactcggacgctggtgaatcatgctggcgaacgtagcatcacctgattaggaaaaggtacaaatatggcacagggtactgtgaaatggttcaacggcgaaaagggatttggtttcatcgctcccaacgatggctccgcagatctcttcgtccactactctgagattcagggctccggtttccgtaatcttgaggaaaaccagccagttgaatttgaggtcggcgagggcgccaagggcccacaggctcagcaggttcgtgctctctaagctctaactgctagctaaaa

SEQ ID NO: 84 - protein, 67 aa, Corynebacterium glutamicum; identical to SEQ ID NO: 82

SEQ ID NO: 85 - DNA, 504 bp, Corynebacterium glutamicum
  CDS (101)..(481): RXA02184
tttaccgcgatgcttgcggtgtataataatttcttctggtcaaaaatagttgatcaatttgaatcagcatatgaattaggaatgaaagtggtgaggacaagtgcctgtcggaacagtgaagtggtacgacgcggagcgtggtttcggctttgtctccaatccaggtggtgaagattgcttcgtaggtaagcaagtacttcccaagggagtcaccgaattgcacaagggacagcgaatcgattttgacttcgccgcaggccgtaagggccctcaagcacttcgaataaagattcttgaaactccacgcaggcgtccacagcacaaatacaagccagaagagctcaacggaatgatctctgacctcatcacgcttctagaaagtggagtgcaaccaggccttgccaaagggcaatacccggagcacaaagctggagcgcaggtagcagaaattcttcgcgttgttgcgaaggagcttgagtcttaaaacaataaggagaggatccg

SEQ ID NO: 86 - protein, 127 aa, Corynebacterium glutamicum
VPVGTVKWYDAERGFGFVSNPGGEDCFVGKQVLPKGVTELHKGQRIDFDFAAGRKGPQALRIKILETPRRRPQHKYKPEELNGMISDLITLLESGVQPGLAKGQYPEHKAGAQVAEILRVVAKELES

SEQ ID NO: 87 - DNA, 324 bp, Corynebacterium glutamicum
  CDS (101)..(301): RXA00810
tcggcgttcgttcaagaaacggccagatgttgctgttcgagctcatgcaagagtggaacatcgaacccggtagtaattccaatcagtaaaggtaagacaaatggcacagggcactgttaagtggttcaacccagagaagggcttcggcttcatcgctccttccgacggatccgctgacgttttcgtccactactccgagatcgagggcaacggcttccgtaccctcgaggagaaccagctcgtcgagttcgaaatcggcgagggcgctaagggccttcaggctcaggctgttcgtgcaatctaattgcatctgagttcgaaacc

SEQ ID NO: 88 - protein, 67 aa, Corynebacterium glutamicum
MAQGTVKWFNPEKGFGFIAPSDGSADVFVHYSEIEGNGFRTLEENQLVEFEIGEGAKGLQAQAVRAI

SEQ ID NO: 89 - DNA, 1017 bp, Corynebacterium glutamicum
  CDS (101)..(994): RXA01674
cggcgtcgattccagaaggtttgtagacatgcttcaaggttgcgctaattgaaaagaacgcggtagacggtactttcatatccacccatataatgttgatatggataatgggtggccgaacctgcaaactctcgcactctttgtggcgattgtggaagaggggagcctcggtgccggtgctcgaaaagtcggaatggcccaacctaatgccagtcgggctatcgcagagcttgaggcagacatgaaagccgaattgttggtacgtcatcctcgaggatcacatccaacagctgctggacttgcgcttgttgagcattcgcgcgatctgcttcaatctgtacaagaatttactgaatgggtgacagagggacgaactgagcagccgctgaaattgcatgttggggccagtatgaccattgccgaggctctacttccagcttgggttgcggacatgcgcacgcgttttcctgcctgccgtgtcgacgtctctgtgatgaattcttctcaagtaattgaagccgtccagaaagggcacttgcaactaggttttattgaaacaccgcatgttcccgtacggcttcatgctcgtgtggtgcaagaggacaagctgattgtggtgatttctcctaatcatgagtgggctaatcgcacgggtaggatcagtcttcgggagttgtcggaaactccgctgatagtgagggaagtcggctcaggtacccgagaagcattacaagaattacttgcggattatgacatggctgagccgattcaagtgttaaacagcaatgctgcggtacgtgttgttgttgaagcaggggcaggtcctgcagtacttggtgaattagccttgcgtgatcatcttgcgctcggcaggctgttgagtgtgccatttgaaggcagtggagttactcgtcctcttacagctgtgtggagtggaccccgcagattgccgattctagcgggagaattagtgtccatcgcatcgaaccacatctgattttgagccctggctaacgg

SEQ ID NO: 90 - protein, 298 aa, Corynebacterium glutamicum
MDNGWPNLQTLALFVAIVEEGSLGAGARKVGMAQPNASRAIAELEADMKAELLVRHPRGSHPTAAGLALVEHSRDLLQSVQEFTEWVTEGRTEQPLKLHVGASMTIAEALLPAWVADMRTRFPACRVDVSVMNSSQVIEAVQKGHLQLGFIETPHVPVRLHARVVQEDKLIVVISPNHEWANRTGRISLRELSETPLIVREVGSGTREALQELLADYDMAEPIQVLNSNAAVRVVVEAGAGPAVLGELALRDHLALGRLLSVPFEGSGVTRPLTAVWSGPRRLPILAGELVSIASNHI

SEQ ID NO: 91 - DNA, 1214 bp, Corynebacterium glutamicum
  CDS (1)..(1191): RXA02431
gtggtggtgacaccccgtcatatcgtttactccgcagcctcgcgccgggtgttccaaatcgtggaaaaacgcgccggaattgtcgaacgcctcagcatcgatgaaggcttcatggaaccagaggctctcgttggagccaccccagaagaggtgaaacagtgggcggaagaattacgcgcggaaattaaagaagttactggcttaccctcctcggttggtgctggctccggtaagcagatcgccaaaattggttcaggcgaagcaaagccagatggtgtgtttgtcgtgccagtagacaagcaacatgacttgcttgatccacttcctgtgggcgcactttggggagtgggtcctgtgacaggctccaagcttgcctcaatgggggtggaaacaattggtgatctagcagcgctaacccaaaaagaagtagaaatcagcctcggtgcaaccatcggaatatcactgtggaaccttgcccgaggaatcgacgaccgccctgtggaaccccgcgccgaagcaaaacagatctcccaagagcacacctatgaaaaagacctcctcaccaggcaacaagtagatgctgccatcattcgatcagccgaaggcgcacaccgacggctcctcaaagacggacgcggtgccagaactgtcagcgtgaaactgcggatggccgactttcgtattgagtctcgttcctacaccttgtcctatgccaccgatgattacgcaactcttgaggcaacagcattccgacttgcccgctaccccggagaagtaggccccatccgccttgtcggagtaagtttttctggtttggaagaatcccgccaagacatcctcttcccggaacttgaccaacaaatcatcgtaccaccagcacccgacaccgattatgaggtaggcgtgcaatcctcttctagttccgaaagtactcaagttgaagcgccgcaagatgtcgcgttgagtatgtggtgcgcaacgcaagatgtctaccacccagaatatggccacggttgggtacaaggtgccggtcacggtgttgtatcagtacgttttgaaacccgcagcaccacaaaagggcgaactaaaagtttttccatggatgacccggacctcaccccggcagaccctctagatagtttggattgggctgactggtttgctgaaaatggtgaaacgggggatgacgaatagggtttcatcgggtttcgggg

SEQ ID NO: 92 - protein, 397 aa, Corynebacterium glutamicum
VVVTPRHIVYSAASRRVFQIVEKRAGIVERLSIDEGFMEPEALVGATPEEVKQWAEELRAEIKEVTGLPSSVGAGSGKQIAKIGSGEAKPDGVFVVPVDKQHDLLDPLPVGALWGVGPVTGSKLASMGVETIGDLAALTQKEVEISLGATIGISLWNLARGIDDRPVEPRAEAKQISQEHTYEKDLLTRQQVDAAIIRSAEGAHRRLLKDGRGARTVSVKLRMADFRIESRSYTLSYATDDYATLEATAFRLARYPGEVGPIRLVGVSFSGLEESRQDILFPELDQQIIVPPAPDTDYEVGVQSSSSSESTQVEAPQDVALSMWCATQDVYHPEYGHGWVQGAGHGVVSVRFETRSTTKGRTKSFSMDDPDLTPADPLDSLDWADWFAENGETGDDE

SEQ ID NO: 93 - DNA, 558 bp, Corynebacterium glutamicum
  CDS (101)..(535): RXA02446
caggaaatcttgctgtctaatgcacaacggaaaactgctcacggacgaactagttgtagcgagcgtattctttgtgttctctcacgacaggaatactgctatggcgatcgagtccatcgcgtacaccagtgaagcactctcaaccggcagtggccggctggggcatgtgcgctccacagatggtgcgctcgaatttgaaatgacaccgccaaaggctttgggcggatccggtgaaggcaccaatccagaacagctgttcgcggtaggttacgcagcctgtttccactctgccatgcactctgtcgcacgcagccgcaagatcactcttgaagacacagcggttggtgcccgagttagcatcgggccaaacggcgctggtggatttgagattgccgtagaactcgaagtatcgattcctcaattgccacaagcagaagcccaggaacttgctgatgccgcgcaccaggtgtgcccgtattccaacgccacacgaggcaatatctcggtaactgtgtcagtcatcgacgaagaggcttaaaaccacaggattaacaaaac

SEQ ID NO: 94 - protein, 145 aa, Corynebacterium glutamicum
MAIESIAYTSEALSTGSGRLGHVRSTDGALEFEMTPPKALGGSGEGTNPEQLFAVGYAACFHSAMHSVARSRKITLEDTAVGARVSIGPNGAGGFEIAVELEVSIPQLPQAEAQELADAAHQVCPYSNATRGNISVTVSVIDEEA

SEQ ID NO: 95 - DNA, 1206 bp, Corynebacterium glutamicum
  CDS (101)..(1183): RXA02861
ccctcgattattacaatccggctacttcggaagcgtttgtggccggatttttctatcctggaaggtattaatacttctttaagggtcggaggattttcgtatgtctactagaacaacgccacaagaccgttataccgacgaatacggcatcgaacgcgtcaacaaggatgaacccggcctggtggacaaactccgggacaagcacgactggtttgatcatctcatgcgcatgaatgaacgtttcggcgcaaaaggtggcaaccaattgtcggcgggtattacgtatttctccgtgctgtcgatcttcccgattgccatgcttgtcttcggtattgcaggtgtcatccttgccggaaaccctgaagttctcacagatattcaaaatcgaatcaacgatgctttagaaggcgagatcggtaacaccgtcaacggcatcattgattccgcgattgcgcagcgtggtgctgtgttgggcattggtggtgtaactgccctgtggtctggactggggtggatggcgaacctgcgctttggagtttcccgcatgtgggccattgacccaactgaaggcaacttcattcaaaagaagctcaccgacttggtcgcgctgatcgtcttgctgctggccatgggcgtagccttcggtatcacggcgctcggtgcttccggactaaccaaaaacctgctggactttgtgggcctgggggagattccgggcattagctacatcacctgggtggtcgcagcacttgttggtgtcttggctaacttcctggtgttcatgtggctgattttctccctgccacgtaccaaagttcccatgaaaccgggtcttcaggcagcactgcttggcgcaatcggttttgaggtggtcaagcaggttggatcgctgttggcttcaaatgcattgagtaaccccgcgggtgcagcattcggtccgatcatcggcatcatggttgtgctgtatttgatctggcgcatcctcatgtattgctctgcgtgggctgccaccagtgaagaagcgttgcgtcttgcgactgttccagcaccagagcctgcgatcattcgggttcgccatgaaattgatccaggtgaagaagtctcccaatctgctcgaaaagtgggcattggagtggccgtgggtgccgcgactgcgggtgcttttgcgctgttgcgtaaaaaatagtttttattaagggcattccc

SEQ ID NO: 96 - protein, 361 aa, Corynebacterium glutamicum
MSTRTTPQDRYTDEYGIERVNKDEPGLVDKLRDKHDWFDHLMRMNERFGAKGGNQLSAGITYFSVLSIFPIAMLVFGIAGVILAGNPEVLTDIQNRINDALEGEIGNTVNGIIDSAIAQRGAVLGIGGVTALWSGLGWMANLRFGVSRMWAIDPTEGNFIQKKLTDLVALIVLLLAMGVAFGITALGASGLTKNLLDFVGLGEIPGISYITWVVAALVGVLANFLVFMWLIFSLPRTKVPMKPGLQAALLGAIGFEVVKQVGSLLASNALSNPAGAAFGPIIGIMVVLYLIWRILMYCSAWAATSEEALRLATVPAPEPAIIRVRHEIDPGEEVSQSARKVGIGVAVGAATAGAFALLRKK

SEQ ID NO: 97 - DNA, 753 bp, Corynebacterium glutamicum
  CDS (101)..(730): RXA00981
aaccaatggctgggtactgatgtggtgatcagtgcccagtttcttctttctactagtgtcggatagaagtacccccagtccagaatgaaggtcaccaccaatgtcagagaatttgccagcgcccgagaatctcctggacgccgagagaattcagatgatcaagaacttccgcaacgaattaacggggttcatgctcaactaccaatttggcattgatgagatcctgaccaagatcaacatcctgaaaactgaattcagccagctgcacgaatacgcacctatcgagcacgtatcttcacgattgaagacaccagaaagcatcgtcaaaaaggtcatccgaaaaggagacgagctctccctcgcagctatcaaagacacagtgtttgatatcgcaggcattcgaatcgtctgcagtttcctcaaagatgcctacgcaatcgccgatatgctgaccaaccaaaaagacgtcacggtcatcgaggccaaagactacatcgctaacccaaagccgaacggctacaagagtttgcaccttatcctccaagtgcctgtcttcctgtctaactccgtggaaaaggtcaatgttgaagtccagatccgcaccattgccatggacttctgggcaagcctcgagcacaaaatctactacaaatttgaacaagaagttcctcagtcaatccttgatgagctcagtgaagatggaaagaatccacggggaagtgaagtcacttaaacctccagttgaaaccactg

SEQ ID NO: 98 - protein, 210 aa, Corynebacterium glutamicum
MSENLPAPENLLDAERIQMIKNFRNELTGFMLNYQFGIDEILTKINILKTEFSQLHEYAPIEHVSSRLKTPESIVKKVIRKGDELSLAAIKDTVFDIAGIRIVCSFLKDAYAIADMLTNQKDVTVIEAKDYIANPKPNGYKSLHLILQVPVFLSNSVEKVNVEVQIRTIAMDFWASLEHKIYYKFEQEVPQSILDELSEDGKNPRGSEVT

SEQ ID NO: 99 - DNA, 1098 bp, Corynebacterium glutamicum
  CDS (101)..(1075): RXN00786
tccttcttccaccagctaaaagtgaattaccccgcctttgtcggggtggttgcattcccagtctaggtgtttagcctcaacgttggatacgctgggaggcatgagctcacctgttatcagccccgaaaccaaaaccggaaagaagatcctgcttgcagcccctcgcggatactgtgccggcgtagaccgtgcagtggaaaccgtcgagcgcgcgctcgaggaatacggcgccccaatttatgtccgtaaagaaatcgtgcacaaccgttacgttgtggacaccctggcagaaaagggcgcgatttttgtcaacgaagcatctgaagcaccagaaggtgccaacatggtgttctctgcacacggcgtgagcccaatggtccacgaagaagctgcagctaaaaacatcaaggctattgacgcggcctgcccgctggtcaccaaagtgcacaaggaagtccagcgctttgataagcagggattccacattctcttcatcggtcacgaaggccatgaagaagtagagggcaccatgggtcattccgttgagaaaacccacctggttgacggcgttgctggcattgccaccctgcctgaattcttaaacgatgaaccaaacctgatctggctgtctcagaccacgctttctgtggacgagaccatggagatcgtccgcgagctgaaggtgaagttccctcagctgcaggatccaccgtcagatgatatttgctacgccacgcagaaccgccaggttgccgtcaaggctatcgctgagcgctgcgagctgatgattgtggtcggttcccgcaactcctccaactcggttcgtctggttgaggtcgctaagcaaaacggtgccgataacgcctacctggtggattacgcccgcgaaatcgacccagcatggttcgaaggcgtagagaccatcggtatctcctccggcgcttccgtgcctgagatcctcgtccagggcgtcattgagcgcctggctgagttcggctacgacgacgtcgaggaagtcacctccgccgctgagaagattgttttcgcgctgcctcgcgtgctgcgccacaagaattaattgcaagaatgaaaaatccc

SEQ ID NO: 100 - protein, 325 aa, Corynebacterium glutamicum
MSSPVISPETKTGKKILLAAPRGYCAGVDRAVETVERALEEYGAPIYVRKEIVHNRYVVDTLAEKGAIFVNEASEAPEGANMVFSAHGVSPMVHEEAAAKNIKAIDAACPLVTKVHKEVQRFDKQGFHILFIGHEGHEEVEGTMGHSVEKTHLVDGVAGIATLPEFLNDEPNLIWLSQTTLSVDETMEIVRELKVKFPQLQDPPSDDICYATQNRQVAVKAIAERCELMIVVGSRNSSNSVRLVEVAKQNGADNAYLVDYAREIDPAWFEGVETIGISSGASVPEILVQGVIERLAEFGYDDVEEVTSAAEKIVFALPRVLRHKN

SEQ ID NO: 101 - DNA, 1131 bp, Corynebacterium glutamicum
  CDS (101)..(1108): RXS01027
aatagatggaagtagtttttcattcacttatgtgcgcgtttttaatctggtttctaccaagaactgtgtgcaccacaacgcggaaggtgaatcgcacccaatggcaaataagaacaataagcctcatgaggtggacaaagaccaagattcagccatgctgatcaacggtcgcctgcaacagatcccggcgcgtcccactgaggaattcacccgcccaactcttgcagcaggtgcagtactgtggcgcggcgacatcaccaacccggacagcatcgaggtcgctgtcatccaccgcccgcactatgatgactggtccctggccaagggcaaagtcgatcccggcgagtctattccgacaaccgcggcccgtgaaatccttgaagaaactggctacgacatccgtctgggcaagctgatcggcaaggttacttaccctgtgctcgaccgaaccaaagtggtctactactggactgcccaggttcttggtggagagtttgtccccaacgatgaagttgatgaaatccgttggctgtctgttgatgaagcatgcgagttgctcagctaccaagtagataccgaagttctggccaaggcagcaaagcgtttccgcactccttccaccactcgggtgctgtatgttcgccatgctcatgcacatggtcgccaaacctggggtggcgacgacaataagcgcccattggacaaaaaggggcgtcgacaagcagaaatgctcgtacccatgttgttgcccttcaaacccaccgcaatttactcggcggtgcccgatcgctgccaagccaccgcgctcccccttgccgatgagctcggcctcgacgtgtccgtcaaccgactgttcggcgacgacgcctgggaaaccgatcccgaggcctgcaagaagcgcttcaccgacgtggtcgcgcaaggtggcgtgccgatgatcgttgggcagggcgacatcattccggaaatgatcaaatggttctccgagaacggcaccctccctatcgatgagaagatcaaggcgaaaaagggcagcgtgtgggtgttgagctttcacgacggtgtgttcaccggcgctgattacctggcgagttccctgccggttaaataggagcgcgtttaaggcctcca

SEQ ID NO: 102 - protein, 336 aa, Corynebacterium glutamicum
MANKNNKPHEVDKDQDSAMLINGRLQQIPARPTEEFTRPTLAAGAVLWRGDITNPDSIEVAVIHRPHYDDWSLAKGKVDPGESIPTTAAREILEETGYDIRLGKLIGKVTYPVLDRTKVVYYWTAQVLGGEFVPNDEVDEIRWLSVDEACELLSYQVDTEVLAKAAKRFRTPSTTRVLYVRHAHAHGRQTWGGDDNKRPLDKKGRRQAEMLVPMLLPFKPTAIYSAVPDRCQATALPLADELGLDVSVNRLFGDDAWETDPEACKKRFTDVVAQGGVPMIVGQGDIIPEMIKWFSENGTLPIDEKIKAKKGSVWVLSFHDGVFTGADYLASSLPVK

SEQ ID NO: 103 - DNA, 651 bp, Corynebacterium glutamicum
  CDS (101)..(628): RXS01528
cacccaaacccaaacctctcagtcgaataagcagaagtctcaggacaaccgcaggggtaagggtcgtaggtctccaaccaggaggcgttccaacacgagggtgaatcaggcgtggcagcagtcccgtttggttacttctgatgagacttccgcaggtggtctcgtggtgtcaggtttggctgaggcggtcaacgctaacaatgaggttgatctgtcgaagatttatgttgcgttgattggtcgccttgatcgtcgtggtcgtttgttgtggtcgatgccgaagggccatgttgagcctggtgaggataaggctgcgactgctgagcgtgaggtgtgggaggagaccggcatccacggtgaggtgttcactgagttgggtgtgattgattattggttcgtttcggaagggaagcggatccataagacggtgcatcatcatttgttgcgttatgttgatggcgatttgaatgatgaggatccagaagtcactgaggtggcgtggattccggcgaatcagttgattgagcatttggcttttgcggatgagcggaagttggctaggcaggcgcatgatttgttgcctgagtttgctttgaaggaaaaggcggagggaaggtccaccccaaggtgattccgaaccccaacccgaac

SEQ ID NO: 104 - protein, 176 aa, Corynebacterium glutamicum
VNQAWQQSRLVTSDETSAGGLVVSGLAEAVNANNEVDLSKIYVALIGRLDRRGRLLWSMPKGHVEPGEDKAATAEREVWEETGIHGEVFTELGVIDYWFVSEGKRIHKTVHHHLLRYVDGDLNDEDPEVTEVAWIPANQLIEHLAFADERKLARQAHDLLPEFALKEKAEGRSTPR

SEQ ID NO: 105 - DNA, 509 bp, Corynebacterium glutamicum
  CDS (1)..(486): RXS01716
gaagtcactcctgagggattcaaagagatcacccgtgaaaacaccatcgttcgcctgggcaaaggcgtcgacgccaccggtcagctagaccccgaggcaatcgagcgcactcgtgtcgctttggaaaactacgttgaactcatggaaacccatggggtagaggccgtacgaatggttgccacctccgcaacccgcgatgcgtccaaccgcgatgaattcttttcgatgacccgccagcttctgtccaagatccgtcctggataccaagctgaagtaatttccggcgaagaggaagctctgctgtccttccgaggtgcaatcgttgacctgcctgaagaccaaggtcctttctgtgttatcgaccttggcggtggatccactgagttcatcgttggcacctacgacggtgaaatcctaggctcccactcaacccaaatgggatgcgtgcgcctgaccgaacgaatcatgcgcagcgacccacccgactgaaaccgaagtggaaatcgccc

SEQ ID NO: 106 - protein, 162 aa, Corynebacterium glutamicum
EVTPEGFKEITRENTIVRLGKGVDATGQLDPEAIERTRVALENYVELMETHGVEAVRMVATSATRDASNRDEFFSMTRQLLSKIRPGYQAEVISGEEEALLSFRGAIVDLPEDQGPFCVIDLGGGSTEFIVGTYDGEILGSHSTQMGCVRLTERIMRSDPPD

SEQ ID NO: 107 - DNA, 654 bp, Corynebacterium glutamicum
  CDS (101)..(631): RXS01835
tcaacatctattcctcctgcgatttgcatgggatatatattaaaaattctagccgaaagtttcctgcgtgaatacactttccccgcgccttcgcaaagctatgaatactgccgcgtgggcacaccgccaccacgtacgcaaaggcggtggaattccgtatgtcagccatctttattcagtgatgtacttgctggccagcgtcactaatgatgaagatgtgctcatcgccgggctgctccacgacaccctcgaagacgtacccgaggaatacaattctgcccaacttgaagctgattttggtccgcgggtgcgcgagttggtggaagagctcaccaaacagcccttaaaaagctggaaagcgcgtgccgacgcttacctcctgcacctcagcgcaggtgccagcttagaggctgtcttaatctccaccgcagataaactgcataatctcatgtccatcttggatgaccttgaaatacacggtgaagatttatggcaacgctttaacgctggcaaagagcagcaaatctggtggtatagcgaggtttatcagatatctctccagcgcttagggttcaatgagttgaataaacaactggggttgtgcgtcgaaaagctcttaaagcaaagcgcctaggcgctcggcggcgtcgataa

SEQ ID NO: 108 - protein, 177 aa, Corynebacterium glutamicum
MNTAAWAHRHHVRKGGGIPYVSHLYSVMYLLASVTNDEDVLIAGLLHDTLEDVPEEYNSAQLEADFGPRVRELVEELTKQPLKSWKARADAYLLHLSAGASLEAVLISTADKLHNLMSILDDLEIHGEDLWQRFNAGKEQQIWWYSEVYQISLQRLGFNELNKQLGLCVEKLLKQSA

SEQ ID NO: 109 - DNA, 1050 bp, Corynebacterium glutamicum
  CDS (101)..(1027): RXS02497
tcgatgccgccgctggcgaagactcggggaaacctaaaaataccgaagaagaatttgaccgattcacactttgccaccctagaccgtctaacctttaggtgtgagattaggtgtattagatgtgggcagcaatactgtccacctagttgcagtagacgcgcgtcccggtggacaccccaccccgatgagcaattggcgtaccccactgcgccttgttgagcttcttgatgactccggggcgatctccgaaaagggcatcaacaaactcacctcagcagtcggggaagcagcagacctagcgaaaacgctcggctgcgctgaactgatgccatttgctacatcggcagtccgctccgccaccaacagcgaggcagtgctcgaccacgtggagaaggaaaccggcgtccgcctgtccatcctttccggtgaagacgaagcacgccaaactttcctcgcagttcgacgttggtatggatggtccgcagggcgcataactaacctcgacatcggtggcggctccctggaactatcctccggaaccgacgaatccccagacctcgcgttctcactggatctgggtgcgggccgcttgacccacaactggttcgacaccgatccaccggcacgtaagaaaatcaacctcctgcgcgattatatcgatgcggaacttgcagaacccgcccgccagatgcgcaccctagggcccgcgcgcctggcagtgggaacatccaaaactttccgcaccctggcacgactgactggtgctgcgccctcatccgcaggaccacacgtcacccgaaccctcaccgcgccgggtctgcgccagctgatcgcatttatctcacgaatgactgcggcggaccgcgctgagctggaaggtatcagctcggatcggtcacatcagatcgtggcaggtgcgctagttgcggaagctgcgatgcgtgcgttggatattgacaaggtagaaatttgtccgtgggcacttcgtgaaggtgtgatcctcaccaggatcgacaaaggactcgagtaacatttacccggaaaggagtt

SEQ ID NO: 110 - protein, 309 aa, Corynebacterium glutamicum
VRLGVLDVGSNTVHLVAVDARPGGHPTPMSNWRTPLRLVELLDDSGAISEKGINKLTSAVGEAADLAKTLGCAELMPFATSAVRSATNSEAVLDHVEKETGVRLSILSGEDEARQTFLAVRRWYGWSAGRITNLDIGGGSLELSSGTDESPDLAFSLDLGAGRLTHNWFDTDPPARKKINLLRDYIDAELAEPARQMRTLGPARLAVGTSKTFRTLARLTGAAPSSAGPHVTRTLTAPGLRQLIAFISRMTAADRAELEGISSDRSHQIVAGALVAEAAMRALDIDKVEICPWALREGVILTRIDKGLE

SEQ ID NO: 111 - DNA, 534 bp, Corynebacterium glutamicum
  CDS (101)..(511): RXS02972
acctacgacggtgaaatcctaggctcccactcaacccaaatgggatgcgtgcgcctgaccgaacgaatcatgcgcagcgacccacccgactgaaaccgaagtggaaatcgcccgcgactacgttgcagaacgcatccaggaagtaaaagccatcgtcccaatttcaaaggcaaaaacctttgtgggatgcgcaggcaccttcaccacaatctccgcctgggtgcaaggcctagaaagctacgaccgcgacgcgatccacctctctgcactcaacttcgatgcactgcgagttgtcaccgatgagatcatttcagaatcatcatcacagcgcgccagcaacccagttgttgatccaggtcgcgccgacgtcatcggtggcggatccgttgttgtccaagcagcgatcgacttagcctccaaagaagccggtgtagactacatcattatttccgaaaaagacatcctcgacggcctcatccttggcctggtagaagccgactctttgaagaaataggaccctagttttaaaccact

SEQ ID NO: 112 - protein, 137 aa, Corynebacterium glutamicum
VEIARDYVAERIQEVKAIVPISKAKTFVGCAGTFTTISAWVQGLESYDRDAIHLSALNFDALRVVTDEIISESSSQRASNPVVDPGRADVIGGGSVVVQAAIDLASKEAGVDYIIISEKDILDGLILGLVEADSLKK

SEQ ID NO: 113 - DNA, 636 bp, Corynebacterium glutamicum
  CDS (101)..(613): RXA02159
tgatggaccagcgtccaaagttttcgatgaagcagaaaaccgcctccacgctcagaaagcactgctggtgtggctgctggccaaccagccgaggtaagacatgtcccttggctcaaccccgtcaacaccggaaaacttaaatcccgtgactcgcactgcacgccaagctctcattttgcagattttggacaaacaaaaagtcaccagccaggtacaactgtctgaattgctgctggatgaaggcatcgatatcacccaggccaccttgtcccgagatctcgatgaactcggtgcacgcaaggttcgccccgatgggggacgcgcctactacgcggtcggcccagtagatagcatcgcccgcgaagatctccggggtccgtcggagaagctgcgccgcatgcttgatgaactgctggtttctacagatcattccggcaacatcgcgatgctgcgcaccccgccgggagctgcccagtacctggcaagtttcatcgatagggtggggctgaaagaagtcgttggcaccatcgctggtgatgacaccgttttcgttctcgcccgtgatccgctcacaggtaaagaactaggtgaattactcagcgggcgcaccacttaaagcgcccctagttcaaggct

SEQ ID NO: 114 - protein, 171 aa, Corynebacterium glutamicum
MSLGSTPSTPENLNPVTRTARQALILQILDKQKVTSQVQLSELLLDEGIDITQATLSRDLDELGARKVRPDGGRAYYAVGPVDSIAREDLRGPSEKLRRMLDELLVSTDHSGNIAMLRTPPGAAQYLASFIDRVGLKEVVGTIAGDDTVFVLARDPLTGKELGELLSGRTT

SEQ ID NO: 115 - DNA, 486 bp, Corynebacterium glutamicum
  CDS (101)..(463): RXA02201
tctaccagccaaatcatcaactcatagcgaaggaatcaacttcatgaataatcaaccatcagtacttttcgtttgcgtcggcaatggtggaaaatctcaaatggccgcagcgctagccaaaaaacatgccggggacgctctcaaagtttattcagctggcacaaagccaggtacgaaattaaatcaacagtcccttgattccattgctgaagttggcgcagatatgtctcaagggtttccaaagggcattgaccaggagttaattaagcgagtagaccgcgtggtcattcttggtgccgaagctcaactagaaatgcctatcgatgcaaacggcatactacagcgctgggtaactgacgaaccctctgaacgtggaattgaaggtatggaacgcatgcgcctggtccgagatgatattgacgcccgagtccaaaacctcgtcgctgaactaacccaaaacgcatagcagttttctaatctcacaca

SEQ ID NO: 116 - protein, 121 aa, Corynebacterium glutamicum
MAAALAKKHAGDALKVYSAGTKPGTKLNQQSLDSIAEVGADMSQGFPKGIDQELIKRVDRVVILGAEAQLEMPIDANGILQRWVTDEPSERGIEGMERMRLVRDDIDARVQNLVAELTQNA

SEQ ID NO: 117 - DNA, 510 bp, Corynebacterium glutamicum
  CDS (101)..(487): RXA00599
gaacgatcggccctttgattgaagtcccagtattagtcggattggtttatgtcatgttgtggcttggaccaaaaatctttaaaaaggagaatgcaggatcatgaaatcagttttgtttgtgtgcgtcggtaatggcggaaaatcacagatggcggcggcgctggcacagaagtatgcatcagattcagtagagatccattctgctggaaccaagcctgcacaggggctaaaccaattgtctgtggaatccatcgctgaggtgggcgctgatatgtcgcaaggaattcccaaagcgatcgatccggagctgctgcgcactgtcgatcgtgtggttattttgggcgatgacgcacaggtagatatgcctgaatctgcacagggcgctcttgagcgttggtcaattgaggaaccggatgctcaaggtatggaacgtatgcgtattgtgcgggatcagatcgataaccgagtccaagctttgctagcgggataagcgccgaaaaaggggcatgt

SEQ ID NO: 118 - protein, 129 aa, Corynebacterium glutamicum
MKSVLFVCVGNGGKSQMAAALAQKYASDSVEIHSAGTKPAQGLNQLSVESIAEVGADMSQGIPKAIDPELLRTVDRVVILGDDAQVDMPESAQGALERWSIEEPDAQGMERMRIVRDQIDNRVQALLAG

SEQ ID NO: 119 - DNA, 1221 bp, Corynebacterium glutamicum
  CDS (101)..(1198): RXA00600
cggagttaatgagcggtaggtggatgggtgcggtcatgtccgtcattatatattgacgcacatcgatattgaaggtatttttatatcggcaaacatcaatatgattgaaggctggctcatgacccttactaaagagcattcgacacctcgagcggctggctcaatgtcgtttcttgaccgctggttagctgcctggattttcttggctatggctgctgggttgttaatcggcaaggtctttccaggaattggggcgcttttgagcgcggtggaaattggtggaatttccattccaattgctatcggtttgatcgtcatgatgtatccacctttggccaaggtgcgctacgacaaaactaaagaaatcagcacagaccgcgctctcatggtggtgtcgattatgttgaactggatcgttggaccagcacttatgtttagcctggcgtggctgtttcttccagatcaaccagagcttcgcactgggctaattatcgtgggccttgcgcgctgtatcgcgatggttttggtatggagtgatctcgcttgtggtgaccgggaagcaactgctgtgctggttgcaatcaactcggtgttccagatccttatgttcggtgtgcttggttggttttacctgcagattcttccctcgtggctgggattagacaccacgtcggtgactttctctgtggtatcaatcgtgacttccgttctcgtgttcttgggcataccacttgtagctggagttttatctcgcgtcattggtgaaaaaacaaagggacggcgctggtacgaggacacgttcctgcctaagatttcacccttggcgctgattggcttgctatacacaattgttctgctgttttcgttgcagggggatgaaatcacagcgcagccttggacagtagctcgtcttgcattgccgctgctgatgtactttgtgggcatgtttttcatttccctggtggtatccaaactgtccgggttaacttatgagcgagctgcttccgtgtcttttactgcagcaggaaacaactttgaattagcgattgcggtatcgatcggaacctttggtgcgacatcaccgcaggcattagctggaacgatcggccctttgattgaagtcccagtattagtcggattggtttatgtcatgttgtggcttggaccaaaaatctttaaaaaggagaatgcaggatcatgaaatcagttttgtttgtgtgc

SEQ ID NO: 120 - protein, 366 aa, Corynebacterium glutamicum
MIEGWLMTLTKEHSTPRAAGSMSFLDRWLAAWIFLAMAAGLLIGKVFPGIGALLSAVEIGGISIPIAIGLIVMMYPPLAKVRYDKTKEISTDRALMVVSIMLNWIVGPALMFSLAWLFLPDQPELRTGLIIVGLARCIAMVLVWSDLACGDREATAVLVAINSVFQILMFGVLGWFYLQILPSWLGLDTTSVTFSVVSIVTSVLVFLGIPLVAGVLSRVIGEKTKGRRWYEDTFLPKISPLALIGLLYTIVLLFSLQGDEITAQPWTVARLALPLLMYFVGMFFISLVVSKLSGLTYERAASVSFTAAGNNFELAIAVSIGTFGATSPQALAGTIGPLIEVPVLVGLVYVMLWLGPKIFKKENAGS

SEQ ID NO: 121 - DNA, 1233 bp, Corynebacterium glutamicum
  CDS (101)..(1210): RXA02200
attgtgtggagagtggtcataaatccactatatattgacgaatgtcgatattgaaagtattttgaatatcgacaggtatcaatataccgaaaggtgtcgcatgacaaactcaactcagacgcgggccaagccagcccgaatctcatttcttgataaatacattccactttggattattttggcgatggcgtttgggctatttttaggccggagcgtttcgggactctcaggctttctaggcgcaatggaagtcggagggatctccttgccaatcgctttaggcctccttgtaatgatgtacccaccgttggccaaagttcggtatgacaaaactaaacaaattgccactgataagcatttgatgggcgtgtcactcattctcaattgggtggtgggtcctgccttaatgttcgcgctagcttggttgttcctcccagaccaaccggaattacgaaccggcctgattattgtaggactcgcacgatgtattgcgatggtcttggtttggtctgatatgtcctgtggagaccgcgaggctacagcagttctcgtagccattaattcagtttttcaagtcgcaatgtttggtgcacttggctggttctatctgcaagttttaccatcctggctaggattaccaactaccaccgctcaattctctttctggtcaattgtgacttcggttttggtgttcctcggaatacctctacttgctggagttttctcgcgaattattggcgaaaagatcaagggacgtgagtggtatgaacaaaagttccttccggcaatctctccatttgcactaatcggtctgctttatacgatcgtcttgttgttttcattgcaaggtgatcagatcgtctctcaaccatgggctgtagttcgtctcgcgataccattggttatctatttcgttggaatgtttttcatttcactcattgcgtcaaaactatctggcatgaactatgcaaagtctgcatccgtctctttcactgcagctggcaacaattttgaacttgcgattgcggtgtcgatcggaacgtttggcgcaacttctgcacaggctatggcaggaacgattggtcccttgattgaaattccagtacttgtcggcttggtctacgccatgctgtggctaggccccaagttgttcccaaatgaccccacgctgccatcatcagctcgttctaccagccaaatcatcaactcatagcgaaggaatcaacttcatga

SEQ ID NO: 122 - protein, 370 aa, Corynebacterium glutamicum
MTNSTQTRAKPARISFLDKYIPLWIILAMAFGLFLGRSVSGLSGFLGAMEVGGISLPIALGLLVMMYPPLAKVRYDKTKQIATDKHLMGVSLILNWVVGPALMFALAWLFLPDQPELRTGLIIVGLARCIAMVLVWSDMSCGDREATAVLVAINSVFQVAMFGALGWFYLQVLPSWLGLPTTTAQFSFWSIVTSVLVFLGIPLLAGVFSRIIGEKIKGREWYEQKFLPAISPFALIGLLYTIVLLFSLQGDQIVSQPWAVVRLAIPLVIYFVGMFFISLIASKLSGMNYAKSASVSFTAAGNNFELAIAVSIGTFGATSAQAMAGTIGPLIEIPVLVGLVYAMLWLGPKLFPNDPTLPSSARSTSQIINS

SEQ ID NO: 123 - DNA, 762 bp, Corynebacterium glutamicum
  CDS (101)..(739): RXA02202
cgctgaactaacccaaaacgcatagcagttttctaatctcacacatcttcaacaccgttaaatctattggtttccccgtaaaatcttcgaaaggaagaacatgaccgggcaagctgcaccaaacttgcataccaatattttgaaccgtatcgcaaatgaactggcgttgacctatcaaggagttttctctgcagagactatcaaccgctatatttttgaatcgtatgtgtcgttggcgagaacagcaaaaatccatacgcacctgccaattttggcagaaggttttgctaaagaccggctgcacgcacttgcggtagctgaaggtaaggtggcttcacctgtgcctcaggtcctatttatttgcgtccacaacgcaggtcgttcacaaattgcttcggcgttgttgtctcactatgccggtagttctgtagaggtacgttctgcaggttctttacctgcttctgaaattcacccactggtgttggaaattttgtcagagcgaggagtgaacatttctgatgcatttccgaaaccgctaaccgatgatgttattcgcgcatctgactatgtcataacaatgggatgtggagatgtgtgcccaatgtatccaggaaagcactatctcgattgggagctcgctgatccgtcagatgaaggtgaggacaagatacaggaaataattgaggaaattgacggtcgaatccgcgagctttggaaaagcattcaattatcgcaaaactaggcagtcaaaggtctggcacc

SEQ ID NO: 124 - protein, 213 aa, Corynebacterium glutamicum
MTGQAAPNLHTNILNRIANELALTYQGVFSAETINRYIFESYVSLARTAKIHTHLPILAEGFAKDRLHALAVAEGKVASPVPQVLFICVHNAGRSQIASALLSHYAGSSVEVRSAGSLPASEIHPLVLEILSERGVNISDAFPKPLTDDVIRASDYVITMGCGDVCPMYPGKHYLDWELADPSDEGEDKIQEIIEEIDGRIRELWKSIQLSQN

SEQ ID NO: 125 - DNA, 1002 bp, Corynebacterium glutamicum
  CDS (101)..(979): RXA02205
gcccaaaccgagcctggatacccgcaaaccacttgaaccgaccattcgctgtttcacgcccaccacactactgaggtcataaggtagtacggtagatcgggtgaatgaagagataaccctcctagccgcagcagcagatcctgccgcaactgaaaatattggctgggtacaaaccattgtgctctccatcgttcaaggcctcacagagttcctgccgatcagctccagcggacacctccgaatcatctctgagctgttctggggtgccgatgccggcgcgtcctttaccgccgtggttcagcttggtaccgaagccgcagtgctggtgttttttgccaaggaaatctggcaaatcatcacaggttggttcgctggcgtattcaataaggaacgccgcggatttgaataccgcatgggctggatgatcattgttgccaccattcccgtcgtgatcttgggtgtgttgggcaaggacctgatccgtgaggcgctgcgaaatatgtggatcactgcatccgtgctgatcctgttctccctggtgttcattttggccgagaagatgggcaagaaggaacgcgactacgacaaactgaccatgaaagatgccatcatcatgggtcttgcacagtgtcttgcgctgatccctggcgtgtctcgctccggcggcaccatctctgctggtttgttccttggtctcaagcgtgaagtagccaccaagttctccttcctgctggcaatccctgcagtgcttggctccggtttgtactccctgcctgacgcttttgcgccaagctccggacaagctgcctccggcctacagctcaccgtgggtaccctggttgccttcgtagttggctacatttccattgcgtggctgatgaagttcgtggcaaaccactccttcagctggtttgctgcataccgtattcctgcaggtctgctcgtgatgctgctgctcgcactgggcatgctcaacccataaaattcctgtacatcttaaaa

SEQ ID NO: 126 - protein, 293 aa, Corynebacterium glutamicum
VNEEITLLAAAADPAATENIGWVQTIVLSIVQGLTEFLPISSSGHLRIISELFWGADAGASFTAVVQLGTEAAVLVFFAKEIWQIITGWFAGVFNKERRGFEYRMGWMIIVATIPVVILGVLGKDLIREALRNMWITASVLILFSLVFILAEKMGKKERDYDKLTMKDAIIMGLAQCLALIPGVSRSGGTISAGLFLGLKREVATKFSFLLAIPAVLGSGLYSLPDAFAPSSGQAASGLQLTVGTLVAFVVGYISIAWLMKFVANHSFSWFAAYRIPAGLLVMLLLALGMLNP

SEQ ID NO: 127 - DNA, 975 bp, Corynebacterium glutamicum
  CDS (101)..(952): RXA00900
gtgcggtggctgcgctggtcgctagtgtggtgtgcgcgctggcgccgtcgataagcgtattagtgatcgcacgcctggtgcaggggcttggcggcggtgcgtgcgtggtattgcgcgcgcgatcgtgccagaccttgaacgcggacaaaaggctgcgcacgcctttgcactgctgatgattattcagggaattgctcccgtggtagctccgctcattggtggtgtgctggtcgggccttttggctggcggggaattttctgggcacttgcactggtgaattttgcgcagctgcttgttgctttgctgcagattaaggagtcgaagccagttgaagagcgtaccgcagcaggacttggcggaatgctgtccaactatgtctttgtgctgaagaatcctcaatttttggcatatgtattcacattggggctgtcttttggggcgatgttctcctacatttcggcgtcgccgttcgtgctgcagaatcaaatgggcattccggtactgctgtattccattattttcggagtgaatgcttttggtttgattgtgggcggaatggtcaataggcgacttctgcagcggattcatccacaccgcatcatgcaaactgtgctggccagttttactgtgctgtgtgcgcttttgctgattgaagtgctgtttattaattggataccgctgttcctgttgctgctgtttcttatcgtttcccatattccgatggttatggctaacgcgacagctctgggaactgaagtggtgcgaagcagggcgggatcgggttctgcaattttgggtttcgtgcaattcacgatgggtgctttggtgagttcactggtcggattaggctctgataaggctttgactatgggaatcgcaatgactgcttgtgcactgctggcgtgtgggtgtgcgtacctggcaggtcgaaaaggtattccagaaatgaagtagctctaggtggcgttttaagg

SEQ ID NO: 128 - protein, 284 aa, Corynebacterium glutamicum
VRGIARAIVPDLERGQKAAHAFALLMIIQGIAPVVAPLIGGVLVGPFGWRGIFWALALVNFAQLLVALLQIKESKPVEERTAAGLGGMLSNYVFVLKNPQFLAYVFTLGLSFGAMFSYISASPFVLQNQMGIPVLLYSIIFGVNAFGLIVGGMVNRRLLQRIHPHRIMQTVLASFTVLCALLLIEVLFINWIPLFLLLLFLIVSHIPMVMANATALGTEVVRSRAGSGSAILGFVQFTMGALVSSLVGLGSDKALTMGIAMTACALLACGCAYLAGRKGIPEMK

SEQ ID NO: 129 - DNA, 537 bp, Corynebacterium glutamicum
  CDS (101)..(514): RXN00901
ttttaagtattggtgctatcttccggtgctgatggtacctgaatgaaaatttctaattaaaaatacccccaaatcttcgatatagatacacgagacagtgatgcagaaaaaacaacagctgagcaccgccctgattatgggattggcattattgtcagccagctccgcgctagcgactgatatgtatttgccggcaatgcctggtattgcggaagatttggggacaactgcaccgatggtgcagttaactctttcttcctttatggctggaatggcgattggccaattgatcattggtcctttgtcggatcaattgggaaggaaaggcctgctcgttgcaggtgcggtggctgcgctggtcgctagtgtggtgtgcgcgctggcgccgtcgataagcgtattagtgatcgcacgcctggtgcaggggcttggcggcggtgcgtgcgtggtattgcgcgcgcgatcgtgccagaccttgaacgcggacaaaaggctgcgcacgcctttgcactgctgatgattattcagggaattgct

SEQ ID NO: 130 - protein, 138 aa, Corynebacterium glutamicum
MQKKQQLSTALIMGLALLSASSALATDMYLPAMPGIAEDLGTTAPMVQLTLSSFMAGMAIGQLIIGPLSDQLGRKGLLVAGAVAALVASVVCALAPSISVLVIARLVQGLGGGACVVLRARSCQTLNADKRLRTPLHC

SEQ ID NO: 131 - DNA, 501 bp, Corynebacterium glutamicum
  CDS (101)..(478): FRXA00901
acctgaatgaaaatttctaattaaaaatacccccaaatcttcgatatagatacacgagacagtgatgcagaaaaaacaacagctgagcaccgccctgattatgggattggcattattgtcagccagctccgcgctagcgactgatatgtatttgccggcaatgcctggtattgcggaagatttggggacaactgcaccgatggtgcagttaactctttcttcctttatggctggaatggcgattggccaattgatcattggtcctttgtcggatcaattgggaaggaaaggcctgctcgttgcaggtgcggtggctgcgctggtcgctagtgtggtgtgcgcgctggcgccgtcgataagcgtattagtgatcgcacgcctggtgcaggggcttggcggcggtgcgtgcgtggtattgcgcgcgcgatcgtgccagaccttgaacgcggacaaaaggctgcgcacgcctttgcactgctgatgattattcagggaattgct

SEQ ID NO: 132 - protein, 126 aa, Corynebacterium glutamicum
MGLALLSASSALATDMYLPAMPGIAEDLGTTAPMVQLTLSSFMAGMAIGQLIIGPLSDQLGRKGLLVAGAVAALVASVVCALAPSISVLVIARLVQGLGGGACVVLRARSCQTLNADKRLRTPLHC

SEQ ID NO: 133 - DNA, 1299 bp, Corynebacterium glutamicum
  CDS (101)..(1276): RXA00289
cctccccataagttcactcaagcaagttctcccgaacagattcacccgagaagtcgacagaccccattaaacagcccgattcaagaaaggcttcgcagccatgagcaccaccaccgcgcccgaagcacggtttcctgtcgtccctttgaccgccatgagtttcgcggcatttgtttatgtcacgttcgagatgtttgcagttggcctcatcaagccgatggccagcgatcttggagtgtcagaatccagcatcggcctgttgatgactgtgtatgcgactgtcgttgccgtggtgacgatccctgccatgttgtgggtttctcgatttaacaagcgcacagttttcctgattactctggcatttttggccacgggcattgttgttcaggcactgaccgttaattatggaatgctagccatcggccgcactatcgcagcattgactcacggggtgttttgggcacttgttgggccaatggcagcgcgtatgtccccaggtcacactggtcgtgcagtaggcgttgtgtcgattggatcaaccatggcgctggtcgttggttctccgctggcaacatggatcggtgaactcatcggatggcgtcctgccacctggattcttggtgcgctgaccattgcggccgtggctgtactcattccaaccgttccatcactgccaccacttccagacacggaatcagagtccaaagaaaagaaatcccttccatggggtctcatttccctggtcattttccttctccttgccgtcaccggtgtttttgctgcctacacctaccttggcctcatcatcgctgaaacagcaggggacagcttcgtgtccattggcttgttcgccttcggtgcactcggactcattggcgtgacagtggcaacccgaactgtggatcaacgcatgctgcgtggaagtgttcacaccaccactttgtttgtcattgctgcaattctcggacagatcgcattcggattagagggcacactagccgtagtagctatcttccttgcagtcaccgtgtttggtggagcatacggcgctctcccaaccctgggaaccaccatcttcctccatgcgggtcgcgaccacccagatactgcatcctccatttatgtggtcacttaccaagtgggtatcgcgtctggcgcggcacttggcgcgatggctgtggatgccgattgggttgctggcactttgtggatcatggctggactgtcattggcttccacgttggccttggcgctgtggtcccgcccgctactgaagtagcagcccaaattcagcccact

SEQ ID NO: 134 - protein, 392 aa, Corynebacterium glutamicum
MSTTTAPEARFPVVPLTAMSFAAFVYVTFEMFAVGLIKPMASDLGVSESSIGLLMTVYATVVAVVTIPAMLWVSRFNKRTVFLITLAFLATGIVVQALTVNYGMLAIGRTIAALTHGVFWALVGPMAARMSPGHTGRAVGVVSIGSTMALVVGSPLATWIGELIGWRPATWILGALTIAAVAVLIPTVPSLPPLPDTESESKEKKSLPWGLISLVIFLLLAVTGVFAAYTYLGLIIAETAGDSFVSIGLFAFGALGLIGVTVATRTVDQRMLRGSVHTTTLFVIAAILGQIAFGLEGTLAVVAIFLAVTVFGGAYGALPTLGTTIFLHAGRDHPDTASSIYVVTYQVGIASGAALGAMAVDADWVAGTLWIMAGLSLASTLALALWSRPLLK

SEQ ID NO: 135 - DNA, 420 bp, Corynebacterium glutamicum
  CDS (101)..(397): RXN01984
aggaaatgtctcacgtcacaaccttttgaaaggtggctaagtacgcacatttgttgtctgcaatagtgccggtgagggagctgtccgatattgtgcttacatgcacgaatctggaaaaaatcctgtcaaggttgtcgactcgcaggcaccacaaggacgcggtgggcatatcggcggacatatcaaacgccgcccgattcctaggcaaacggaaatttccgaggttcgtcgatatatcgtcatgactgccctcgcactcggtggcttcgccatcggtgtgacggaatttgtctccatgggtctgctcagcgcgatcgcctccgactttgagatctccgaagaccaagccggacacatcatcaccatctacgccctcgcgtggttgtgggtgccccgctgatcacagcgtttaccggcaaa

SEQ ID NO: 136 - protein, 99 aa, Corynebacterium glutamicum
MHESGKNPVKVVDSQAPQGRGGHIGGHIKRRPIPRQTEISEVRRYIVMTALALGGFAIGVTEFVSMGLLSAIASDFEISEDQAGHIITIYALAWLWVPR

SEQ ID NO: 137 - DNA, 379 bp, Corynebacterium glutamicum
  CDS (101)..(379): FRXA01984
aggaaatgtctcacgtcacaaccttttgaaaggtggctaagtacgcacatttgttgtctgcaatagtgccggtgagggagctgtccgatattgtgcttacatgcacgaatctggaaaaaatcctgtcaaggttgtcgactcgcaggcaccacaaggacgcggtgggcatatcggcggacatatcaaacgccgcccgattcctaggcaaacggaaatttccgaggttcgtcgatatatcgtcatgactgccctcgcactcggtggcttcgccatcggtgtgacggaatttgtctccatgggtctgctcagcgcgatcgcctccgactttgagatctccgaagaccaagccggacacatcatcaccatctacgccctcgcg

SEQ ID NO: 138 - protein, 93 aa, Corynebacterium glutamicum
MHESGKNPVKVVDSQAPQGRGGHIGGHIKRRPIPRQTEISEVRRYIVMTALALGGFAIGVTEFVSMGLLSAIASDFEISEDQAGHIITIYALA

SEQ ID NO: 139 - DNA, 735 bp, Corynebacterium glutamicum
  CDS (101)..(712): RXA00109
aagtgggggaagatttcgacaactaaccgggcgcaaagatgaaactaatgcgtccgaccacggcgaaaaggaagtttcgcccatctatgagaggttgaatgtggcttcagagaagaatctaaaattgcgtaccttggcggcagctgctggggtgttgggcgttggcgcgatgtcgatgctcgtggctccgcaggctgctgcccatgatgtggtggtggattctaatcctgaaaatggcagtgtcgttgatgagttcccggagaccattgagttggagttttccggtattcctcaggatctgttcacaacagttgcattgagcaatgcggattccggagaggtgttaacttctggaactcctcagcttgaggggcagcacttgagctatgaagtgccatctgatgtgcagacgggagctggtaactacattttgggtttccagatcacttcttctgatggtcacgctactaaaggttcaatctcttttgaggtgacaggctctgctgaaacgacaacagagacaacagcagagacgacaactgagtcagcagcaaccactgacacctcagagaccaccgaagcagagacaactgaaactgctgatgaaacttctggaattcctgcgccgtggaattgggttttgagcatcgtggcggtgcttgttgttgcaagtgccatcgtcatgatgattgcaaagaatcgtaaccagaaataagagggtttattcaccatgaa

SEQ ID NO: 140 - protein, 204 aa, Corynebacterium glutamicum
VASEKNLKLRTLAAAAGVLGVGAMSMLVAPQAAAHDVVVDSNPENGSVVDEFPETIELEFSGIPQDLFTTVALSNADSGEVLTSGTPQLEGQHLSYEVPSDVQTGAGNYILGFQITSSDGHATKGSISFEVTGSAETTTETTAETTTESAATTDTSETTEAETTETADETSGIPAPWNWVLSIVAVLVVASAIVMMIAKNRNQK

SEQ ID NO: 141 - DNA, 735 bp, Corynebacterium glutamicum; identical to SEQ ID NO: 139
  CDS (101)..(712): RXA00109

SEQ ID NO: 142 - protein, 204 aa, Corynebacterium glutamicum; identical to SEQ ID NO: 140

SEQ ID NO: 143 - DNA, 864 bp, Corynebacterium glutamicum
  CDS (101)..(841): RXA00996
atcttaagccttttgtccaaggctctgagttcttagtggcggtatttaccaagaagtaacacctctatcttgcacctgatctggcgtagactcataagttatgagcaccgtaacggcagtgcaggtcaacggcctaaaagtttccatatcgtccggtttttcacgcaagaaaacaaaaacgatcttgcatgatctcgatttcaccgtagagaccggaaagatcacgggattgctggggccatcgggcagcggcaagacaactttgatgcgcgcgattgtgggagtgcaaaacttcgacggcacccttgaggtgtttgatcagcccgcaggtgctgcctctctgcgcgggaaaatcggctatgtcacccaaaacgccagcgtatatcacgatctgtcggtgatagaaaacctcaagtatttcggggctctggctaaaggaacctccactccacgcaccccggaaaagattctggaggtcttagacatcgcagatcttgctcaacgccaagtatcaacactatctggtgggcagcgcggccgagtctcccttggatgtgcgcttattgcctcaccagaactcttggtgatggatgagccaaccgtgggtttggatcccattacccggcaagcactgtgggaagagttcaccaccatcgcaaaagcaggtgctggagtggttatctccagtcacgtgttggaggaagccgcgcggtgcgacaacctcattttgttgcgtgatggtcggatcatctggaggggaacacccacacgccttctagaagatacaggcaaaagctcatacgaagatgctttcttggctgccattgacggggtaaggtcatgaaccctcactatctgcttgcc

SEQ ID NO: 144 - protein, 247 aa, Corynebacterium glutamicum
MSTVTAVQVNGLKVSISSGFSRKKTKTILHDLDFTVETGKITGLLGPSGSGKTTLMRAIVGVQNFDGTLEVFDQPAGAASLRGKIGYVTQNASVYHDLSVIENLKYFGALAKGTSTPRTPEKILEVLDIADLAQRQVSTLSGGQRGRVSLGCALIASPELLVMDEPTVGLDPITRQALWEEFTTIAKAGAGVVISSHVLEEAARCDNLILLRDGRIIWRGTPTRLLEDTGKSSYEDAFLAAIDGVRS

SEQ ID NO: 145 - DNA, 2463 bp, Corynebacterium glutamicum
  CDS (101)..(2440): RXN00829
tgttttagccatggaccccatactagggagagttttgttttggtgctagaaaaggttcaccaagcgcgaacaggcctatgcaaacggtacgatatgacacatgcaaaaagctgattcccatgattggatttcggtccacggtgcgaatgaaaacaacctcaaaaatgtgtcggtgcgcatccctaaaaggcgtctcaccgtgttcacgggtgtgtcgggatctggcaagtcctcgctggtgttcggcacaattgctgcggaatcacgccggttgatcaacgaaacctatagcacttttgtgcaaggtttcatgccgtcgatggcaaggcccgatgttgaccatttggaaggcatcaccacggcgatcatcgtcgatcaggagcagatgggcgcaaacccacggtctacggtgggtaccgcaactgatgccaccgcgatgttgcgcattttgttttcccgaatcgcggaacctaacgcgggtggcccgggagcttattccttcaacgtcccctctgtttccgcatccggcgccatcacggtggaaaagggcggaaacaccaagcgggagaaagctaccttcaaacgcacgggtggcatgtgcccagcgtgcgagggcatgggcagggcctcagacatcgacctcaaagagcttttcgacgcctccctctccctcaacgacggcgccctgaccatccccggttacaccccaggtggatggagttatcggatgtattcagaatcgggcctttttgatgctgccaagccgattaaggatttcaccgaggaagaacgccacaacttcctttatcttgagcccaccaagatgaagatcgctggcatcaacatgacctatgagggtcttatcccccgcattcagaaatccatgttgtctaaggatcgcgaaggcatgcagaagcatattcgtgcgttcgtggatcgagcggttaccttcattccttgccctgcgtgtggtggaactcgattagcgccacatgccttggagtccaagatcaatggcaaaaacatcgctgagttgtgcgcgatggaggtccgtgatttggccaagtggatcaaaacggtggaagccccctcggttgctcccctgctcaccgcactgactgaaaccctggataacttcgtggagatcggtttgggctatatccaactcgatcgccccgctggcacgttgtctggtggtgaggcacagcgcaccaagatgatccgccatttgggctctgcattgactgacgtcacctatgtttttgatgaacccaccgccggtttgcacgcctacgacattgaacgcatgaacaagttgctgctcgatcttcgcgataaaggcaataccgttttagtcgtggagcacaagccggaaaccatcgccattgcagatcatgtggtggaccttgggccaggtgcaggcgcgggtggaggtgaaattcggtttgaggggagcgtcgacaagcttaaagacagcgacaccgtgactggcctccattttaatgaccgggcgtcattgaaggaatccgtgcgtgcgccgcatggcgccctggagatccgcggggccgatcgaaataatttgaacaatgtggatgtcgatattccgctcggcgtgttcacggcgatttccggcgttgcaggttcgggtaagtcctcgttgattcatgagattccgcgtgatgagtcggttgtgtttgtcgatcaaaccgcaatccacggttctaatcgttccaatcctgcgacatatacaggcatgctggattcgattcgcaaggcttttgccaaggccaatgatgtgaaaccggcgctgttctcccccaattctgaaggcgcgtgcccaaactgtaagggcgccggctcggtctatgtcgatttgggcatgatggctggggtatcttcgccgtgtgaggtgtgcgagggcaagcgttttgatgagtccgtgttggactaccactttggtggcaaggacatcgcagacgtgttggggctgtcggctgccaatgcgtatgagtttttcgcggcgaaagattcaaagattttgcctgcggcaaagatcgcaaagaggcttgtcgacgtcggcctcggctacatcaccctcggccagccgctcaccacgttgtccggcggtgaacgccagcgtttgaagctcgccacccacatggcagacaaggccaccacctttattttggatgagcccaccacaggcctgcacctcgctgatgtgaaaaccttgctggatctttttgatcaactggttgatgacggcaagtctgtcatcgtcatcgaacaccacctcggcgtgctcgctcacgctgaccacatcattgatgtcggccctggtgcaggttctgatggtggctcgattgtattcgagggcagccccgcggaactcatcaaaactgatactccaacaggacgccaccttaaagcttatgtagattagtttcttatggaaaaccctgg

SEQ ID NO: 146 - protein, 780 aa, Corynebacterium glutamicum
MQKADSHDWISVHGANENNLKNVSVRIPKRRLTVFTGVSGSGKSSLVFGTIAAESRRLINETYSTFVQGFMPSMARPDVDHLEGITTAIIVDQEQMGANPRSTVGTATDATAMLRILFSRIAEPNAGGPGAYSFNVPSVSASGAITVEKGGNTKREKATFKRTGGMCPACEGMGRASDIDLKELFDASLSLNDGALTIPGYTPGGWSYRMYSESGLFDAAKPIKDFTEEERHNFLYLEPTKMKIAGINMTYEGLIPRIQKSMLSKDREGMQKHIRAFVDRAVTFIPCPACGGTRLAPHALESKINGKNIAELCAMEVRDLAKWIKTVEAPSVAPLLTALTETLDNFVEIGLGYIQLDRPAGTLSGGEAQRTKMIRHLGSALTDVTYVFDEPTAGLHAYDIERMNKLLLDLRDKGNTVLVVEHKPETIAIADHVVDLGPGAGAGGGEIRFEGSVDKLKDSDTVTGLHFNDRASLKESVRAPHGALEIRGADRNNLNNVDVDIPLGVFTAISGVAGSGKSSLIHEIPRDESVVFVDQTAIHGSNRSNPATYTGMLDSIRKAFAKANDVKPALFSPNSEGACPNCKGAGSVYVDLGMMAGVSSPCEVCEGKRFDESVLDYHFGGKDIADVLGLSAANAYEFFAAKDSKILPAAKIAKRLVDVGLGYITLGQPLTTLSGGERQRLKLATHMADKATTFILDEPTTGLHLADVKTLLDLFDQLVDDGKSVIVIEHHLGVLAHADHIIDVGPGAGSDGGSIVFEGSPAELIKTDTPTGRHLKAYVD

SEQ ID NO: 147 - DNA, 278 bp, Corynebacterium glutamicum
  CDS (1)..(255): FRXA00829
ttggatgagcccaccacaggcctgcacctcgctgatgtgaaaaccttgctggatctttttgatcaactggttgatgacggcaagtctgtcatcgtcatcgaacaccacctcggcgtgctcgctcacgctgaccacatcattgatgtcggccctggtgcaggttctgatggtggctcgattgtattcgagggcagccccgcggaactcatcaaaactgatactccaacaggacgccaccttaaagcttatgtagattagtttcttatggaaaaccctgg

SEQ ID NO: 148 - protein, 85 aa, Corynebacterium glutamicum
LDEPTTGLHLADVKTLLDLFDQLVDDGKSVIVIEHHLGVLAHADHIIDVGPGAGSDGGSIVFEGSPAELIKTDTPTGRHLKAYVD

SEQ ID NO: 149 - DNA, 1663 bp, Corynebacterium glutamicum
  CDS (101)..(1663): FRXA00834
tgttttagccatggaccccatactagggagagttttgttttggtgctagaaaaggttcaccaagcgcgaacaggcctatgcaaacggtacgatatgacacatgcaaaaagctgattcccatgattggatttcggtccacggtgcgaatgaaaacaacctcaaaaatgtgtcggtgcgcatccctaaaaggcgtctcaccgtgttcacgggtgtgtcgggatctggcaagtcctcgctggtgttcggcacaattgctgcggaatcacgccggttgatcaacgaaacctatagcacttttgtgcaaggtttcatgccgtcgatggcaaggcccgatgttgaccatttggaaggcatcaccacggcgatcatcgtcgatcaggagcagatgggcgcaaacccacggtctacggtgggtaccgcaactgatgccaccgcgatgttgcgcattttgttttcccgaatcgcggaacctaacgcgggtggcccgggagcttattccttcaacgtcccctctgtttccgcatccggcgccatcacggtggaaaagggcggaaacaccaagcgggagaaagctaccttcaaacgcacgggtggcatgtgcccagcgtgcgagggcatgggcagggcctcagacatcgacctcaaagagcttttcgacgcctccctctccctcaacgacggcgccctgaccatccccggttacaccccaggtggatggagttatcggatgtattcagaatcgggcctttttgatgctgccaagccgattaaggatttcaccgaggaagaacgccacaacttcctttatcttgagcccaccaagatgaagatcgctggcatcaacatgacctatgagggtcttatcccccgcattcagaaatccatgttgtctaaggatcgcgaaggcatgcagaagcatattcgtgcgttcgtggatcgagcggttaccttcattccttgccctgcgtgtggtggaactcgattagcgccacatgccttggagtccaagatcaatggcaaaaacatcgctgagttgtgcgcgatggaggtccgtgatttggccaagtggatcaaaacggtggaagccccctcggttgctcccctgctcaccgcactgactgaaaccctggataacttcgtggagatcggtttgggctatatccaactcgatcgccccgctggcacgttgtctggtggtgaggcacagcgcaccaagatgatccgccatttgggctctgcattgactgacgtcacctatgtttttgatgaacccaccgccggtttgcacgcctacgacattgaacgcatgaacaagttgctgctcgatcttcgcgataaaggcaataccgttttagtcgtggagcacaagccggaaaccatcgccattgcagatcatgtggtggaccttgggccaggtgcaggcgcgggtggaggtgaaattcggtttgaggggagcgtcgacaagcttaaagacagcgacaccgtgactggcctccattttaatgaccgggcgtcattgaaggaatccgtgcgtgcgccgcatggcgccctggagatccgcggggccgatcgaaataatttgaacaatgtggatgtcgatattccgctcggcgtgttcacggcgatttccggcgttgcaggttcgggtaagtcctcgttgatt

SEQ ID NO: 150 - protein, 521 aa, Corynebacterium glutamicum
MQKADSHDWISVHGANENNLKNVSVRIPKRRLTVFTGVSGSGKSSLVFGTIAAESRRLINETYSTFVQGFMPSMARPDVDHLEGITTAIIVDQEQMGANPRSTVGTATDATAMLRILFSRIAEPNAGGPGAYSFNVPSVSASGAITVEKGGNTKREKATFKRTGGMCPACEGMGRASDIDLKELFDASLSLNDGALTIPGYTPGGWSYRMYSESGLFDAAKPIKDFTEEERHNFLYLEPTKMKIAGINMTYEGLIPRIQKSMLSKDREGMQKHIRAFVDRAVTFIPCPACGGTRLAPHALESKINGKNIAELCAMEVRDLAKWIKTVEAPSVAPLLTALTETLDNFVEIGLGYIQLDRPAGTLSGGEAQRTKMIRHLGSALTDVTYVFDEPTAGLHAYDIERMNKLLLDLRDKGNTVLVVEHKPETIAIADHVVDLGPGAGAGGGEIRFEGSVDKLKDSDTVTGLHFNDRASLKESVRAPHGALEIRGADRNNLNNVDVDIPLGVFTAISGVAGSGKSSLI

SEQ ID NO: 151 - DNA, 864 bp, Corynebacterium glutamicum
  CDS (101)..(841): RXA00995
gtcggatcatctggaggggaacacccacacgccttctagaagatacaggcaaaagctcatacgaagatgctttcttggctgccattgacggggtaaggtcatgaaccctcactatctgcttgccacggtcaaacgagtcctgctgcagctgaaagccgataaacgttccatcgcgctgattcttctagcacccgtggcgttgatgtcgctgttttattacatgtattcctccacaccggcaggcacccagctgtttaagaccatttccacggtcatgatcgcagtgttccccttgatgctcatgtttttgatgacgtcggtgacgatgcaaagagaacgcaacgctggaacgctcgagcgcttgtggaccacgaacattcaccgcgttgatttgatcggtggctacggggtggccttcggcatcatggcggtggcgcaatctttgctcatggtgctcacccttcggtatctcctgggtgtggaaaccgaatcggagtggtggatttctacgctcattgctgcgatcaccggtcttatcggagtgtctcttggcctgttgagctctgcgtttgccagcactgagttccaagctatccaaacgctgccgttgcttattttgccccagttcctattgtgcggtttgctgatcccacgggatgatctgccggatgtgttgcgctgggtttctaatgtgttgccgctgtcctatgcagttgatgcagcgcttgaggcctcacggacgggaatcggacagcaagtagtggtcaacattgccatctgcgccgcgtttgccgtgagcttcctgctggtggcggcgctatcgatgccgagaatgacccgctagattactcttccagcgaggtg

SEQ ID NO: 152 - protein, 247 aa, Corynebacterium glutamicum
MNPHYLLATVKRVLLQLKADKRSIALILLAPVALMSLFYYMYSSTPAGTQLFKTISTVMIAVFPLMLMFLMTSVTMQRERNAGTLERLWTTNIHRVDLIGGYGVAFGIMAVAQSLLMVLTLRYLLGVETESEWWISTLIAAITGLIGVSLGLLSSAFASTEFQAIQTLPLLILPQFLLCGLLIPRDDLPDVLRWVSNVLPLSYAVDAALEASRTGIGQQVVVNIAICAAFAVSFLLVAALSMPRMTR

SEQ ID NO: 153 - DNA, 1353 bp, Corynebacterium glutamicum
  CDS (101)..(1330): RXN00803
tcatccttccttagctcgcgtgagcttcccaagcgtaagcacccccgtgtgagggcataacggccgttctgttaaagattggtctggccatttcctccatatgggggtgtccgcgcttaacatgtctgacatggtggcgaacaaacgggcacagcgtaaagtctggctagcggtagctttatcggtctttacggtcgcgtggggtggcaatgaattcactcccttgctggtgttttaccgaggtgaagggttctttagcaacctgttcatcgaccttttgctggtgttttatgccatcggagtagcggtaggtttgctggcagctggtcctttatctgaccgctatggccgacgtgccgtcatgttgcctgcgccattgatcgcgatcttgggttccgcgttgattgcctcgggtgaagaaaccgccatcctgattgccattggtcgagtgctgtcgggaatttcggtgggcatggtgatgacagcgggaggttcctggattaaggagctttcatcgtcgcggtttgagccaggggtgaaaaccagtgctggtgcaaaacgcgcatcgatgtctttgaccggtggttttgcgctcggcccagcgcttgctggtgtgatggcacagtggctgccactacctggacagttggcatatgttttgcacattattctcactctgattttgttcccgttgcttattacagcgccggaaactcgtcaatcagcgcacctgaaaactaagggatcattctggtcagatgtgcttgtgccatctgcactagacaagcgattcttgtttgtggttgctccaattggaccgtgggttttcggtgcggccttcactgcctacgcagttttgccgtcgcagctgcgtgacatggtttctgcacccgttgcgtattctgcgctgatcgctttggttaccttaggttctggatttggtatccaacaattcggtcctcaaatcatgggcacctctaaaactcgcgggccgattttggccatgttcgtcacagtcatcggcatgatcggcgcggtgatcgtggtgatgaaccctcatccatggtgggcgctagttggctgcatggccctcggcctgtcttatggcctgtgtatgttcatggggttggcggaaactcaaaacattgctccacctattgatatggcaggcctgacgggtattttctactgcctgacgtacgtaggtatggtctttccagccttgatgacctggttgaatcaatggctcagttacccgttcatgctgggctttggtgcggtgatggcaactatttgtctgatcattgtgagttttagtgcacgccgattctgagaaacaactaaagtgagcca

SEQ ID NO: 154 - protein, 410 aa, Corynebacterium glutamicum
MGVSALNMSDMVANKRAQRKVWLAVALSVFTVAWGGNEFTPLLVFYRGEGFFSNLFIDLLLVFYAIGVAVGLLAAGPLSDRYGRRAVMLPAPLIAILGSALIASGEETAILIAIGRVLSGISVGMVMTAGGSWIKELSSSRFEPGVKTSAGAKRASMSLTGGFALGPALAGVMAQWLPLPGQLAYVLHIILTLILFPLLITAPETRQSAHLKTKGSFWSDVLVPSALDKRFLFVVAPIGPWVFGAAFTAYAVLPSQLRDMVSAPVAYSALIALVTLGSGFGIQQFGPQIMGTSKTRGPILAMFVTVIGMIGAVIVVMNPHPWWALVGCMALGLSYGLCMFMGLAETQNIAPPIDMAGLTGIFYCLTYVGMVFPALMTWLNQWLSYPFMLGFGAVMATICLIIVSFSARRF

SEQ ID NO: 155 - DNA, 703 bp, Corynebacterium glutamicum
  CDS (101)..(703): FRXA00803
tcatccttccttagctcgcgtgagcttcccaagcgtaagcacccccgtgtgagggcataacggccgttctgttaaagattggtctggccatttcctccatatgggggtgtccgcgcttaacatgtctgacatggtggcgaacaaacgggcacagcgtaaagtctggctagcggtagctttatcggtctttacggtcgcgtggggtggcaatgaattcactcccttgctggtgttttaccgaggtgaagggttctttagcaacctgttcatcgaccttttgctggtgttttatgccatcggagtagcggtaggtttgctggcagctggtcctttatctgaccgctatggccgacgtgccgtcatgttgcctgcgccattgatcgcgatcttgggttccgcgttgattgcctcgggtgaagaaaccgccatcctgattgccattggtcgagtgctgtcgggaatttcggtgggcatggtgatgacagcgggaggttcctggattaaggagctttcatcgtcgcggtttgagccaggggtgaaaaccagtgctggtgcaaaacgcgcatcgatgtctttgaccggtggttttgcgctcggcccagcgcttgctggtgtgatggcacagtggctgccacaacctggacagttggcatatgttttgcacattattctcactctgattttgttcccgttgcttattaca

SEQ ID NO: 156 - protein, 201 aa, Corynebacterium glutamicum
MGVSALNMSDMVANKRAQRKVWLAVALSVFTVAWGGNEFTPLLVFYRGEGFFSNLFIDLLLVFYAIGVAVGLLAAGPLSDRYGRRAVMLPAPLIAILGSALIASGEETAILIAIGRVLSGISVGMVMTAGGSWIKELSSSRFEPGVKTSAGAKRASMSLTGGFALGPALAGVMAQWLPQPGQLAYVLHIILTLILFPLLIT

SEQ ID NO: 157 - DNA, 1014 bp, Corynebacterium glutamicum
  CDS (101)..(991): RXA01407
atccggggaacggatcccaaagatctccttgatgccatcgcgtttttaacctggccagctctggttgccccagtgatcgccccacttctgggaggtcttcttgcaagataccattggttgccgatggatcttcctcctcaacgtgcccttaggaatcatcgcgatcatggctggactattcatccagcccaagaacacggccgtgaatgtgaagcgatttgatcggccaggtttcctcggcgcaatgctggtgatggtggcgcaagccgtgattgcggagttaatttgcagcagaagtccggccgcacttactatctgtgcatgcctcgtcttaagtgctgcggtggtatgcggttttgtagtgcgctggctgcgagttccaggccgactttttgatctcagcatcatgcgcatcccaggtttccgagtgggtaattcctccggaagtatctaccgcttggtaatcaccgcagcaccattcatgttcactttgctcttccaagtggcgtttgggtggtctgcaacattagcgggtgccatggtggtcgcactattcgcaggcaacgtggcaatcaaacctttcaccacgccgatcattaaacgctggaatttcaaaccagtactggtcttttctaacgctgctggcgccttggtattggcaacttttttgttcgttcgtgcagataccccactggttctcatcgtgctgctgctctttgtttcgggcgcattaaggtccctcggtttcagcgcctacaacaccttgcagtttgtcgatatctcaccagaacaaaccagcaacgccaacgtgttatcagcaaccctgcaccaactaggcatgtctttgggtattgcggtagcagtcatcgccatgtcccttgcacccaccgccaactgggcattcccactggcagcagcgttgttcctcattcctctaatcggcgcactatctttgcctcgcgacggcggtgcccgagccttttcctcctcttagaaacccacttctgaaaggta

SEQ ID NO: 158 - protein, 297 aa, Corynebacterium glutamicum
LQDTIGCRWIFLLNVPLGIIAIMAGLFIQPKNTAVNVKRFDRPGFLGAMLVMVAQAVIAELICSRSPAALTICACLVLSAAVVCGFVVRWLRVPGRLFDLSIMRIPGFRVGNSSGSIYRLVITAAPFMFTLLFQVAFGWSATLAGAMVVALFAGNVAIKPFTTPIIKRWNFKPVLVFSNAAGALVLATFLFVRADTPLVLIVLLLFVSGALRSLGFSAYNTLQFVDISPEQTSNANVLSATLHQLGMSLGIAVAVIAMSLAPTANWAFPLAAALFLIPLIGALSLPRDGGARAFSSS

SEQ ID NO: 159 - DNA, 324 bp, Corynebacterium glutamicum
  CDS (101)..(301): RXA01408
cgcatagagttatctcgaaactaccaagacggtttcttttctttagatctaaggaggagagaccgtctttcaccctttcatctgattggacatcgacgccatgcgcaatgatcggtcctttagcgttcccattgcgctacttgccgcgggagcactgtttctagaaatcctcgacggcaccatcctgacaaccgcagtgccagctattgctcgtgacttcggtattgacgccgtggatgtcagcattgcactggttgcttacttggcagccgcagcagctggcattccgctgcagggtggctagcggatcgatttggtgtgcgc

SEQ ID NO: 160 - protein, 67 aa, Corynebacterium glutamicum
MRNDRSFSVPIALLAAGALFLEILDGTILTTAVPAIARDFGIDAVDVSIALVAYLAAAAAGIPLQGG

SEQ ID NO: 161 - DNA, 1275 bp, Corynebacterium glutamicum
  CDS (101)..(1252): RXN01922
acactcctttggtcacctggtttggttgagggaaacagaccgcccaagaacccaagaaatcccaagaaaacatgctgcttatgaattaaagtgagcacccatgagatcaggaaacgccaatcgcgtcttcataggtgttaccatcctgctgtttactgcaggatgggcagccaatcatttcgcgtcagtgttggtgttgatccgtgaacaattagacgtatcaagcgtgctggtcaacggcgcttttggtatttatgcactgggacttcttccaagtttgctcgcaggcggtgtgcttgccgaccgttttggtgcccgcatggtggtactcaccggaggtgtactttctgcgcttggaaacctttctcttttagcgtttcatgatggtccttccctcctggtaggacgattcatcgttggtctgggcgttggattagtcgtcagcgcgggcaccgcatgggcgggcagattgcgcggagcaagcggcgtgacattggccggcattattctgaccgccggtttcatgatggggccgattgtgacaagtgggttggggatggcgtcgacaagcattattacgccctttgccataagcgttgccctctcgctgatcgcggtggttgtgggatttgcgcttggcgatgcccgcagcaccccgagcgcacttggcgcatccagcggaatcaaacacgaacgaagcatgaaaaaggccctcgcggtgtccttgccgatggcaatttgggtgttcagctgcatcaccacctccctgatcgtgatgtccgcgcgcatcgactccaccttcggcaacgccattcttctccccggaatcggcgcggcgatcgccttcagcgcaggcctgatcgcacaatttttaggtaggaaattcgcgtggggtcgtggctccggaatcgtgggcgcgctgtgtgccctcgcgggttttgcgctggcagcttttggtggcgactccattccagtgtggcttttcgttatcgcctcgatcctgttcggcaccgcatatggcctctgcctgcgcgaaggcctcctcagcatcgaaacttacacgccactcaaccgacgtggcaccggcatcggcatctattatgtgttcacgtatttgggattcgggctgccagtgcttctcgacgccctcctcccgcaccttggcgcctccattccgctgtacgcgctggcggcgctcgcccttggctccgcagtaatccgcggcgtacaaatcaagcgcgggtatgtggtttagatttctacctacgacctgaa

SEQ ID NO: 162 - protein, 384 aa, Corynebacterium glutamicum
MRSGNANRVFIGVTILLFTAGWAANHFASVLVLIREQLDVSSVLVNGAFGIYALGLLPSLLAGGVLADRFGARMVVLTGGVLSALGNLSLLAFHDGPSLLVGRFIVGLGVGLVVSAGTAWAGRLRGASGVTLAGIILTAGFMMGPIVTSGLGMASTSIITPFAISVALSLIAVVVGFALGDARSTPSALGASSGIKHERSMKKALAVSLPMAIWVFSCITTSLIVMSARIDSTFGNAILLPGIGAAIAFSAGLIAQFLGRKFAWGRGSGIVGALCALAGFALAAFGGDSIPVWLFVIASILFGTAYGLCLREGLLSIETYTPLNRRGTGIGIYYVFTYLGFGLPVLLDALLPHLGASIPLYALAALALGSAVIRGVQIKRGYVV

SEQ ID NO: 163 - DNA, 1130 bp, Corynebacterium glutamicum
  CDS (1)..(1107): FRXA01922
ctgctgtttactgcaggatgggcagccaatcatttcgcgtcagtgttggtgttgatccgtgaacaattagacgtatcaagcgtgctggtcaacggcgcttttggtatttatgcactgggacttcttccaagtttgctcgcaggcggtgtgcttgccgaccgttttggtgcccgcatggtggtactcaccggaggtgtactttctgcgcttggaaacctttctcttttagcgtttcatgatggtccttccctcctggtaggacgattcatcgttggtctgggcgttggattagtcgtcagcgcgggcaccgcatgggcgggcagattgcgcggagcaagcggcgtgacattggccggcattattctgaccgccggtttcatgatggggccgattgtgacaagtgggttggggatggcgtcgacaagcattattacgccctttgccataagcgttgccctctcgctgatcgcggtggttgtgggatttgcgcttggcgatgcccgcagcaccccgagcgcacttggcgcatccagcggaatcaaacacgaacgaagcatgaaaaaggccctcgcggtgtccttgccgatggcaatttgggtgttcagctgcatcaccacctccctgatcgtgatgtccgcgcgcatcgactccaccttcggcaacgccattcttctccccggaatcggcgcggcgatcgccttcagcgcaggcctgatcgcacaatttttaggtaggaaattcgcgtggggtcgtggctccggaatcgtgggcgcgctgtgtgccctcgcgggttttgcgctggcagcttttggtggcgactccattccagtgtggcttttcgttatcgcctcgatcctgttcggcaccgcatatggcctctgcctgcgcgaaggcctcctcagcatcgaaacttacacgccactcaaccgacgtggcaccggcatcggcatctattatgtgttcacgtatttgggattcgggctgccagtgcttctcgacgccctcctcccgcaccttggcgcctccattccgctgtacgcgctggcggcgctcgcccttggctccgcagtaatccgcggcgtacaaatcaagcgcgggtatgtggtttagatttctacctacgacctgaa

SEQ ID NO: 164 - protein, 369 aa, Corynebacterium glutamicum
LLFTAGWAANHFASVLVLIREQLDVSSVLVNGAFGIYALGLLPSLLAGGVLADRFGARMVVLTGGVLSALGNLSLLAFHDGPSLLVGRFIVGLGVGLVVSAGTAWAGRLRGASGVTLAGIILTAGFMMGPIVTSGLGMASTSIITPFAISVALSLIAVVVGFALGDARSTPSALGASSGIKHERSMKKALAVSLPMAIWVFSCITTSLIVMSARIDSTFGNAILLPGIGAAIAFSAGLIAQFLGRKFAWGRGSGIVGALCALAGFALAAFGGDSIPVWLFVIASILFGTAYGLCLREGLLSIETYTPLNRRGTGIGIYYVFTYLGFGLPVLLDALLPHLGASIPLYALAALALGSAVIRGVQIKRGYVV

SEQ ID NO: 165 - DNA, 362 bp, Corynebacterium glutamicum
  CDS (1)..(339): RXA02060
gaatttgcccgcattttgaagccaaagggacaggtcatcgtgcttaccgcagataccggccacttggctgagcttcgtgaaccactgggcatcattgatgtggaggccggcaaagttgatcgcatgatcgaacaagcggcaggccacctcaagccagttggcgaaagagacttggtggaatttgaaatgctgctggatcaaaaatccattgcatctcagatcggtatgagcccttctgcacgccacattaagcctgaggctttggcggaacgcatcgccgctctaccagaacaaatgaaggttacagcccgggccaagatcaccaggctggaacgcatctaactcttatctcactgggcctt

SEQ ID NO: 166 - protein, 113 aa, Corynebacterium glutamicum
EFARILKPKGQVIVLTADTGHLAELREPLGIIDVEAGKVDRMIEQAAGHLKPVGERDLVEFEMLLDQKSIASQIGMSPSARHIKPEALAERIAALPEQMKVTARAKITRLERI

SEQ ID NO: 167 - DNA, 1395 bp, Corynebacterium glutamicum
  CDS (101)..(1372): RXN01936
gcgcggtgacaccacagccgttgtcagcggcgcttggtctgtggaggatcgccgaggttactaacaaataggcccaacaaagaggtctaagctctacctggtgagtttccgagatattttcgctgacaccagaccgctgaaagaaccggccttcaaacgcctctggcttggcaatgttgccaccgtcattggtgcccaattaactgttgttgccgttccggtgcagatttaccaaatgactgggtcctccggctatgtgggcttgaccgggctttttggccttattcctttggttatttttggcctttatggtggatccattgcggatgcttttgataaacgcatcgtgctgatctgcaccacgatcggcatgtgtgtcaccactgccggtttttgggtgctgaccattttaggcaatgagaatatttggctcctgttaataaacttttctttacagcaggcatttttcgcggtgaatcaacccacccgaacggcgatccttcgaagtattttgccgattgatcaattagcgtcggcaacatcactgaatatgctgctcatgcagaccggcgcaatcgttggcccgctgatcgcaggtgcgttgattccgctgatcggtttcgggtggctgtatttccttgatgttgtctccatcatccccacactgtgggctgtatggtcactgccttcgatcaagccatccggcaaggtgatgaaggctggtttcgccagtgtggtggatggcctgaagtatttggctggccaacccgtgttgttgatggtgatggtgctggatcttatcgccatgattttcggcatgccacgtgcgctttaccccgagatcgcagaagtgaacttcggtgggggtgacgccggtgcaacgatgctggcgttcatgtactcatccatggctgttggcgcagttcttggcggcgtgctgtctggttgggtggcccggattagccgccagggtgttgcagtttattggtgcatcatcgcctggggcgcagccgttgctttgggtggtgtggcaattgttgtcagccccggcgcggtgactgcgtgggcgtggatgttcatcatcatgatggtcattggtggcatggctgacatgttcagctcggcagttcgaaacgctattttgcagcagtctgctgcggaacatgtgcagggccgaatccaaggtgtgtggatcatcgtcgtggtgggtggacctcgtttagctgacgtccttcacggttgggccgctgagcccctcggcgcaggttggacggtattatggggcggagtagcggtggttgtactcactgcaatttgtatggtggcggtgcctaaattctggaaatacgagaaaccaaaaattaccggcatctaaatacttatccatgcccattt

SEQ ID NO: 168 - protein, 424 aa, Corynebacterium glutamicum
VSFRDIFADTRPLKEPAFKRLWLGNVATVIGAQLTVVAVPVQIYQMTGSSGYVGLTGLFGLIPLVIFGLYGGSIADAFDKRIVLICTTIGMCVTTAGFWVLTILGNENIWLLLINFSLQQAFFAVNQPTRTAILRSILPIDQLASATSLNMLLMQTGAIVGPLIAGALIPLIGFGWLYFLDVVSIIPTLWAVWSLPSIKPSGKVMKAGFASVVDGLKYLAGQPVLLMVMVLDLIAMIFGMPRALYPEIAEVNFGGGDAGATMLAFMYSSMAVGAVLGGVLSGWVARISRQGVAVYWCIIAWGAAVALGGVAIVVSPGAVTAWAWMFIIMMVIGGMADMFSSAVRNAILQQSAAEHVQGRIQGVWIIVVVGGPRLADVLHGWAAEPLGAGWTVLWGGVAVVVLTAICMVAVPKFWKYEKPKITGI

SEQ ID NO: 169 - DNA, 945 bp, Corynebacterium glutamicum
  CDS (101)..(922): FRXA01936
tttacagcaggcatttttcgcggtgaatcaacccacccgaacggcgatccttcgaagtattttgccgattgatcaataagcgtcggcaacatcactgaatatgctgctcatgcagaccggcgcaatcgttggcccgctgatcgcaggtgcgttgattccgctgatcggtttcgggtggctgtatttccttgatgttgtctccatcatccccacactgtgggctgtatggtcactgccttcgatcaagccatccggcaaggtgatgaaggctggtttcgccagtgtggtggatggcctgaagtatttggctggccaacccgtgttgttgatggtgatggtgctggatcttatcgccatgattttcggcatgccacgtgcgctttaccccgagatcgcagaagtgaacttcggtgggggtgacgccggtgcaacgatgctggcgttcatgtactcatccatggctgttggcgcagttcttggcggcgtgctgtctggttgggtggcccggattagccgccagggtgttgcagtttattggtgcatcatcgcctggggcgcagccgttgctttgggtggtgtggcaattgttgtcagccccggcgcggtgactgcgtgggcgtggatgttcatcatcatgatggtcattggtggcatggctgacatgttcagctcggcagttcgaaacgctattttgcagcagtctgctgcggaacatgtgcagggccgaatccaaggtgtgtggatcatcgtcgtggtgggtggacctcgtttagctgacgtccttcacggttgggccgctgagcccctcggcgcaggttggacggtattatggggcggagtagcggtggttgtactcactgcaatttgtatggtggcggtgcctaaattctggaaatacgagaaaccaaaaattaccggcatctaaatacttatccatgcccattt

SEQ ID NO: 170 - protein, 274 aa, Corynebacterium glutamicum
MLLMQTGAIVGPLIAGALIPLIGFGWLYFLDVVSIIPTLWAVWSLPSIKPSGKVMKAGFASVVDGLKYLAGQPVLLMVMVLDLIAMIFGMPRALYPEIAEVNFGGGDAGATMLAFMYSSMAVGAVLGGVLSGWVARISRQGVAVYWCIIAWGAAVALGGVAIVVSPGAVTAWAWMFIIMMVIGGMADMFSSAVRNAILQQSAAEHVQGRIQGVWIIVVVGGPRLADVLHGWAAEPLGAGWTVLWGGVAVVVLTAICMVAVPKFWKYEKPKITGI

SEQ ID NO: 171 - DNA, 549 bp, Corynebacterium glutamicum
  CDS (101)..(526): FRXA01937
gcgcggtgacaccacagccgttgtcagcggcgcttggtctgtggaggatcgccgaggttactaacaaataggcccaacaaagaggtctaagctctacctggtgagtttccgagatattttcgctgacaccagaccgctgaaagaaccggccttcaaacgcctctggcttggcaatgttgccaccgtcattggtgcccaattaactgttgttgccgttccggtgcagatttaccaaatgactgggtcctccggctatgtgggcttgaccgggctttttggccttattcctttggttatttttggcctttatggtggatccattgcggatgcttttgataaacgcatcgtgctgatctgcaccacgatcggcatgtgtgtcaccactgccggtttttgggtgctgaccattttaggcaatgagaatatttggctcctgttaataaacttttctttacagcaggcatttttcgcggtgaatcaacccacccgaacggcgatccttcgaagtattttgccgattgatcaataagcgtcggcaacatcactgaa

SEQ ID NO: 172 - protein, 142 aa, Corynebacterium glutamicum
VSFRDIFADTRPLKEPAFKRLWLGNVATVIGAQLTVVAVPVQIYQMTGSSGYVGLTGLFGLIPLVIFGLYGGSIADAFDKRIVLICTTIGMCVTTAGFWVLTILGNENIWLLLINFSLQQAFFAVNQPTRTAILRSILPIDQ

SEQ ID NO: 173 - DNA, 1242 bp, Corynebacterium glutamicum
  CDS (101)..(1219): RXN01010
gtgccaaagcgtttcctgtaaaacgcataaccccgaataccccctgtttccagatccaaaaaaagatctggcagggggtttaggcatagattaggaacttatgaagaaactgcaaatgccggccattttggtcggaggctttgtggggccgtttactggccaagctctatcagtggtcttgccggaatttgcagacacctttgatatcagtgtcagccaggcagcgctgaccatgaccgcatacttgttgccctttgccaccatgatgttgttttcggggcgcatcaccagaaagatccatccgcataaggtggtgcaggcggcttatattgtcacactgccacttgcgctgttgctcctagttacaccatcgtgggggctgtttatggctgcgtatgccacgattggtatcgctaatgcatttaccactccggtgctgcaaattatgttgcgtgagcttgttccgccgcgttctttgggtaaggcattgggcacctatgctgcgatgcaatcactcggcatgttgtcggcgccactgatcgcaggtgtgtcttcggtggtgtcgtggaggttgaccttcctggtcactgcagcagcgtcactgtttattttggtggcgcgactccccgttgttccaccaccatcagcatcgaagcaaaacgttagtggcaaggtgcagtggggaccgaccatcatccacatggtttccggctttgtggtgggcatcggcatcatcggcattggattcatgacatcgctgcacgttggcgagcaattcggacttgatgctgcagcgcgtggtttggtggtcatgtgtggtggcctggctgcgttctttgcctcccgcaagattggcgatttggcagacaaatttggtgtgcgcgcggtgctcattgtcagtgctgtcatcggtaccatcgcactcgcactgctgccgatcgcaccgtggatcattgtggtggccgtactgtgggccttcgcagtagcagcagcacaaggaatccaagcaaccgtcaacttggctgtcatcggaagccccggtggatcatcgctgctttctaccgtgcaggctttccgattcttcggatcagcggcagcaccagtgacattccttcctatctatatgggcatcggctcgggggcgttttgggtcagcgcggtagcgctgttcttcgttgccatcgcccagtggctcaacccgcagcgggtggagcggggctgagggagacgtcgagaagcgtc

SEQ ID NO: 174 - protein, 373 aa, Corynebacterium glutamicum
MKKLQMPAILVGGFVGPFTGQALSVVLPEFADTFDISVSQAALTMTAYLLPFATMMLFSGRITRKIHPHKVVQAAYIVTLPLALLLLVTPSWGLFMAAYATIGIANAFTTPVLQIMLRELVPPRSLGKALGTYAAMQSLGMLSAPLIAGVSSVVSWRLTFLVTAAASLFILVARLPVVPPPSASKQNVSGKVQWGPTIIHMVSGFVVGIGIIGIGFMTSLHVGEQFGLDAAARGLVVMCGGLAAFFASRKIGDLADKFGVRAVLIVSAVIGTIALALLPIAPWIIVVAVLWAFAVAAAQGIQATVNLAVIGSPGGSSLLSTVQAFRFFGSAAAPVTFLPIYMGIGSGAFWVSAVALFFVAIAQWLNPQRVERG

SEQ ID NO: 175 - DNA, 871 bp, Corynebacterium glutamicum
  CDS (101)..(871): FRXA01010
gtgccaaagcgtttcctgtaaaacgcataaccccgaataccccctgtttccagatccaaaaaaagatctggcagggggtttaggcatagattaggaacttatgaagaaactgcaaatgccggccattttggtcggaggctttgtggggccgtttactggccaagctctatcagtggtcttgccggaatttgcagacacctttgatatcagtgtcagccaggcagcgctgaccatgaccgcatacttgttgccctttgccaccatgatgttgttttcggggcgcatcaccagaaagatccatccgcataaggtggtgcaggcggcttatattgtcacactgccacttgcgctgttgctcctagttacaccatcgtgggggctgtttatggctgcgtatgccacgattggtatcgctaatgcatttaccactccggtgctgcaaattatgttgcgtgagcttgttccgccgcgttctttgggtaaggcattgggcacctatgctgcgatgcaatcactcggcatgttgtcggcgccactgatcgcaggtgtgtcttcggtggtgtcgtggaggttgaccttcctggtcactgcagcagcgtcactgtttattttggtggcgcgactccccgttgttccaccaccatcagcattgaagcaaaacgttagtggcaaggtgcagtggggaccgaccatcatccacatggtttccggctttgtggtgggcatcggcatcatcggcattggattcatgacatcgctgcacgttggcgagcaattcggacttaatactgcagcgcgtggtttggtggtcatgtgtggtggccgggctgcgttctttgcctcccgcaagataggcgatttggcagacaaa

SEQ ID NO: 176 - protein, 257 aa, Corynebacterium glutamicum
MKKLQMPAILVGGFVGPFTGQALSVVLPEFADTFDISVSQAALTMTAYLLPFATMMLFSGRITRKIHPHKVVQAAYIVTLPLALLLLVTPSWGLFMAAYATIGIANAFTTPVLQIMLRELVPPRSLGKALGTYAAMQSLGMLSAPLIAGVSSVVSWRLTFLVTAAASLFILVARLPVVPPPSALKQNVSGKVQWGPTIIHMVSGFVVGIGIIGIGFMTSLHVGEQFGLNTAARGLVVMCGGRAAFFASRKIGDLADK

SEQ ID NO: 177 - DNA, 1266 bp, Corynebacterium glutamicum
  CDS (101)..(1243): RXN03142
gcaatttggccaatcaacaacataggaggactgcgtggcggtcaccgcaagaacggacataaaaccacacccatcgcaaccaacggcactgttcactccagtgtttattttgggctggctcgtcaacttgacccagtacttgagcttctacttcctgatcacagtcatggcgctgtatgcgatggaaagcttcgccgtttcagaggccgctgtcggatttgcggccagctcctttgttatcggcgcaaccgtggctcgtgtgttcgcgggatggacgtccgaccgttttggtaaaaaacagatcctgctcatctttgtcggcttggaagcggtagcatcactattctatattccagctgcctcactaccagcgctggttgctgtgcgttttgttcacggtttttcttattctcttgcttccaccgctgtgatggcacttgtgcagtccgtgattcctgcaagccgtagggcagagggcaccggctacttcgcgctcggatccacactggctacagctttcggcccagcaattgcgctgtttgttatcgatgacttcaactacaacaccctgttctggattaccactgcgaccagtgttttcggcctgatcctcaccgttttgatccgcaagccggagttcattaagaatgcggaacacggcagagtaaagccagtctggtctatcaagactgttgtgcacccatcggtcatgctcattggattcttcatgctcgctgtcggactggcttacgcaggcgtgatcaccttcctcaacggcttcgcgcaagacactggcctcaccgccggagcgggtcttttctttatcgcttatgcggttgcgatgctggtcatgcgtttcttccttggacgcattcaggacaaacatggtgacaacccggttatttacttcggtttgatcagcttcgccctcgcgctggggcttatggctttggcgactgaagactggcacattgttctcgctggcgcactcaccggtttgggctatggcaccatcatgccggccgcacaagccattgctgtcgattcagttccaagcactcaggttggttccggtatttctacgcttttcctgttcaccgacatcggcattggcttaggcccaatcctgctgggtggattggttgcagcgaccggatacaacgtcatgtacgcagctttggccgcagtgattgttgtggcgggcgtgctctacctggttgctttgggtaggaaagctagccactaagttagagcattttattgagc

SEQ ID NO: 178 - protein, 381 aa, Corynebacterium glutamicum
VFILGWLVNLTQYLSFYFLITVMALYAMESFAVSEAAVGFAASSFVIGATVARVFAGWTSDRFGKKQILLIFVGLEAVASLFYIPAASLPALVAVRFVHGFSYSLASTAVMALVQSVIPASRRAEGTGYFALGSTLATAFGPAIALFVIDDFNYNTLFWITTATSVFGLILTVLIRKPEFIKNAEHGRVKPVWSIKTVVHPSVMLIGFFMLAVGLAYAGVITFLNGFAQDTGLTAGAGLFFIAYAVAMLVMRFFLGRIQDKHGDNPVIYFGLISFALALGLMALATEDWHIVLAGALTGLGYGTIMPAAQAIAVDSVPSTQVGSGISTLFLFTDIGIGLGPILLGGLVAATGYNVMYAALAAVIVVAGVLYLVALGRKASH

SEQ ID NO: 179 - DNA, 914 bp, Corynebacterium glutamicum
  CDS (1)..(891): FRXA01150
ccagctgcctcactaccagcgctggttgctgtgcgttttgttcacggtttttcttattctcttgcttccaccgctgtgatggcacttgtgcagtccgtgattcctgcaagccgtagggcagagggcaccggctacttcgcgctcggatccacactggctacagctttcggcccagcaattgcgctgtttgttatcgatgacttcaactacaacaccctgttctggattaccactgcgaccagtgttttcggcctgatcctcaccgttttgatccgcaagccggagttcattaagaatgcggaacacggcagagtaaagccagtctggtctatcaagactgttgtgcacccatcggtcatgctcattggattcttcatgctcgctgtcggactggcttacgcaggcgtgatcaccttcctcaacggcttcgcgcaagacactggcctcaccgccggagcgggtcttttctttatcgcttatgcggttgcgatgctggtcatgcgtttcttccttggacgcattcaggacaaacatggtgacaacccggttatttacttcggtttgatcagcttcgccctcgcgctggggcttatggctttggcgactgaagactggcacattgttctcgctggcgcactcaccggtttgggctatggcaccatcatgccggccgcacaagccattgctgtcgattcagttccaagcactcaggttggttccggtatttctacgcttttcctgttcaccgacatcggcattggcttaggcccaatcctgctgggtggattggttgcagcgaccggatacaacgtcatgtacgcagctttggccgcagtgattgttgtggcgggcgtgctctacctggttgctttgggtaggaaagctagccactaagttagagcattttattgagc

SEQ ID NO: 180 - protein, 297 aa, Corynebacterium glutamicum
PAASLPALVAVRFVHGFSYSLASTAVMALVQSVIPASRRAEGTGYFALGSTLATAFGPAIALFVIDDFNYNTLFWITTATSVFGLILTVLIRKPEFIKNAEHGRVKPVWSIKTVVHPSVMLIGFFMLAVGLAYAGVITFLNGFAQDTGLTAGAGLFFIAYAVAMLVMRFFLGRIQDKHGDNPVIYFGLISFALALGLMALATEDWHIVLAGALTGLGYGTIMPAAQAIAVDSVPSTQVGSGISTLFLFTDIGIGLGPILLGGLVAATGYNVMYAALAAVIVVAGVLYLVALGRKASH

SEQ ID NO: 181 - DNA, 1341 bp, Corynebacterium glutamicum
  CDS (101)..(1318): RXN02964
ttttatatcctagcaagggtgttgcatgatgcaataaacgtggtagtttgtgttcataacaaaattgcatgatgcaataatttcgatttaaaggagaacagtgtccgtagctgaagaagggaaactttttacaccaacgtttgtcatgggatggtttgccaaccttttccagttcctggtgttctacttcctcatcaccaccatggctttgtacgccatcaaggaatttcaagcctctgaagtagaagctggcttcgcatccagctcaattgttatcggcgcagtcttttccaggtttttctccggctatattattgaccgttttggtcgacgcaagattgtgctcatctcagtcctagtcactaccattgcgtgtgccttgtaccttcccatcgaatcattgccattgctatacgcaaacaggttcctccacggtgttggatacgcttttgctgccaccgcgatcatggcaatggtccaggagctcattccagcgtcacgacgttccgaaggtactggttacctggcattgggcactaccgtttctgcagcacttggaccagccctagcactttttgtcctaggaacatttgattacgacatgctgtttatcgtggtcttggcaacctcggtcatctctttgatcgccgtcgtgttcatgtactttaagaccagcgaccctgagccttctggggaaccagccaagttcagcttcaaatctattatgaacccaaagatcatccccatcggcatctttatcttgcttatttgctttgcttactctggcgtcattgcctacatcaacgcatttgctgaagaacgcgatctgattacgggtgctggattgttcttcattgcctacgcagtatcaatgtttgtgatgcgcagcttccttggcaaactgcaggaccgtcgcggagacaacgtcgttatttactttggattgttcttcttcgttatttccttgacgattttgtcctttgccacttccaactggcacgttgtgttgtccggagtcattgcaggtctgggatacggcactttgatgccagcagtgcagtccatcgctgttggtgtagtagacaaaaccgaattcggtacggccttctccactttgttcctgtttgtggacttaggttttggctttggacctattatcctgggagcagtttctgcggcaattggtttcggacctatgtatgcagcactggcaggtgtgggtgtgattgccggaatcttctacctgttcacacacgctcgcaccgatcgagctaagaatggctttgttaaacacccagagcctgtcgctttagttagctagttctttcagctttccctccc

SEQ ID NO: 182 - protein, 406 aa, Corynebacterium glutamicum
VSVAEEGKLFTPTFVMGWFANLFQFLVFYFLITTMALYAIKEFQASEVEAGFASSSIVIGAVFSRFFSGYIIDRFGRRKIVLISVLVTTIACALYLPIESLPLLYANRFLHGVGYAFAATAIMAMVQELIPASRRSEGTGYLALGTTVSAALGPALALFVLGTFDYDMLFIVVLATSVISLIAVVFMYFKTSDPEPSGEPAKFSFKSIMNPKIIPIGIFILLICFAYSGVIAYINAFAEERDLITGAGLFFIAYAVSMFVMRSFLGKLQDRRGDNVVIYFGLFFFVISLTILSFATSNWHVVLSGVIAGLGYGTLMPAVQSIAVGVVDKTEFGTAFSTLFLFVDLGFGFGPIILGAVSAAIGFGPMYAALAGVGVIAGIFYLFTHARTDRAKNGFVKHPEPVALVS

SEQ ID NO: 183 - DNA, 1006 bp, Corynebacterium glutamicum
  CDS (101)..(1006): FRXA02116
ttttatatcctagcaagggtgttgcatgatgcaataaacgtggtagtttgtgttcataacaaaattgcatgatgcaataatttcgatttaaaggagaacagtgtccgtagctgaagaagggaaactttttacaccaacgtttgtcatgggatggtttgccaaccttttccagttcctggtgttctacttcctcatcaccaccatggctttgtacgccatcaaggaatttcaagcctctgaagtagaagctggcttcgcatccagctcaattgttatcggcgcagtcttttccaggtttttctccggctatattattgaccgttttggtcgacgcaagattgtgctcatctcagtcctagtcactaccattgcgtgtgccttgtaccttcccatcgaatcattgccattgctatacgcaaacaggttcctccacggtgttggatacgcttttgctgccaccgcgatcatggcaatggtccaggagctcattccagcgtcacgacgttccgaaggtactggttacctggcattgggcactaccgtttctgcagcacttggaccagccctagcactttttgtcctaggaacatttgattacgacatgctgtttatcgtggtcttggcaacctcggtcatctctttgatcgccgtcgtgttcatgtactttaagaccagcgaccctgagccttctggggaaccagccaagttcagcttcaaatctattatgaacccaaagatcatccccatcggcatctttatcttgcttatttgctttgcttactctggcgtcattgcctacatcaacgcatttgctgaagaacgcgatctgattacgggtgctggattgttcttcattgcctacgcagtatcaatgtttgtgatgcgcagcttccttggcaaactgcaggaccgtcgcggagacaacgtcgttatttactttggattgttcttcttcgttatttccttgacgattttgtcctttgccacttccaactggcacgttgtg

SEQ ID NO: 184 - protein, 302 aa, Corynebacterium glutamicum
VSVAEEGKLFTPTFVMGWFANLFQFLVFYFLITTMALYAIKEFQASEVEAGFASSSIVIGAVFSRFFSGYIIDRFGRRKIVLISVLVTTIACALYLPIESLPLLYANRFLHGVGYAFAATAIMAMVQELIPASRRSEGTGYLALGTTVSAALGPALALFVLGTFDYDMLFIVVLATSVISLIAVVFMYFKTSDPEPSGEPAKFSFKSIMNPKIIPIGIFILLICFAYSGVIAYINAFAEERDLITGAGLFFIAYAVSMFVMRSFLGKLQDRRGDNVVIYFGLFFFVISLTILSFATSNWHVV

SEQ ID NO: 185 - DNA, 568 bp, Corynebacterium glutamicum
  CDS (101)..(568): RXA00858
ttttgtttttcagatgcatgttagatgcgttgagggacaagggtgggggagacctccggttcttaaattgtctaaccaagaaccggaggttctttttgtcatggaagtaaacttagccacatggctaatcactatcgcagtgattgctggcttcttcattttcgatttctattcccacgtccgcaccccacacgagcccactatcaaagaatccgcatggtggagcctcttctacgtagccctcgcctgtgttttcggcgtgttcctctggtttgcttggggcgagccaggtaacccacaccagcacggcattgagttcttcaccggttacgtgacagagaaggcgttgagtgttgataacctcttcatcttcgcgctgatcatgggttctttcaagattcctcgcaagtaccagcagaaggttctgctcatcggtatcgcgctggcactggtcttccgcctggcattcatcctcgcaggtgctgcagttatcgaagcctggtccgatgtcttctacatcttctccatctggctgatctacaccgctgtgaaggctcctgtgcacgag

SEQ ID NO: 186 - protein, 156 aa, Corynebacterium glutamicum
MEVNLATWLITIAVIAGFFIFDFYSHVRTPHEPTIKESAWWSLFYVALACVFGVFLWFAWGEPGNPHQHGIEFFTGYVTEKALSVDNLFIFALIMGSFKIPRKYQQKVLLIGIALALVFRLAFILAGAAVIEAWSDVFYIFSIWLIYTAVKAPVHE

SEQ ID NO: 187 - DNA, 975 bp, Corynebacterium glutamicum
  CDS (101)..(952): RXA02305
tatgcgcgcaggtgtctactggtgacgcagccgacgacgattattttgacgaagccaccgcaaacgatgacttcgatcccgaaaagtggaggaacatgtaatgccagcctttgaggcaatgccaggaatgccgtattggatcgacctgtccacctcggacattgcaaaatctgcacacttctacgaaaacgttctcggctgggaaattgaagaagtcaacgatggctaccgcatggctcgtctgcagggactacccgtggcagggctgatcgatcagcgcggtgaatcaagcatcccggatacctggattacctacttcctctcctacgatctggatgccactgcaaagaagatcgcagaactgggtggacgaattctggccgagccaactgacgtgcacttgggacgcatgatcctagctgttgatactgccggcgcactgttcggcgttattgagccaggcagcgaggaatcattcgtcgctgctggtgaaccaggcacatccgtgtggcatgaactcaccactgtctccaaatattccgaagctatcgatttctacggtgagctgttcacttggacaacctctgaaatggctagtgctgaagacgatagtttccgctacaccaccgcattggctgacggttccgcctttgctggaatttttgatgccaaaggccacttcccacctcaggttccaagcttctggcagtcctaccttggcgtgctcaacgccgatgatgctgcagcgaaggccaaggaatttggtggcgatgttattcgtaagccatgggactcagaatttggccgcatggttctcatctctgattccactggtgccacaattaccttgtgtgaagtagaggaatacgtcgaggaagcagcagaaggcgatgatctcttcgacatcgatctcagtgctttcgaagagcagttccgcaagcaagaaggacagtaatcctacagcgccatggagga

SEQ ID NO: 188 - protein, 284 aa, Corynebacterium glutamicum
MPAFEAMPGMPYWIDLSTSDIAKSAHFYENVLGWEIEEVNDGYRMARLQGLPVAGLIDQRGESSIPDTWITYFLSYDLDATAKKIAELGGRILAEPTDVHLGRMILAVDTAGALFGVIEPGSEESFVAAGEPGTSVWHELTTVSKYSEAIDFYGELFTWTTSEMASAEDDSFRYTTALADGSAFAGIFDAKGHFPPQVPSFWQSYLGVLNADDAAAKAKEFGGDVIRKPWDSEFGRMVLISDSTGATITLCEVEEYVEEAAEGDDLFDIDLSAFEEQFRKQEGQ

SEQ ID NO: 189 - DNA, 948 bp, Corynebacterium glutamicum
  CDS (101)..(925): RXA00084
tcacccttgtcgataccagctactgggtatctggcgtcggtccacttggcggcagcaaagtcttggaagacatcgatgccttcctcgacgcacagcaataatgtccacagctctccccgatcagctcaagtgggaatacagtgccttccccgtgcagatctcgcagaagcaacggcttagtcccggcttcatgcggatcaccgtcactggtgacaagctccgattctttggccagtggggtttggaccaacgcatcaaactgatcattccaagcccggctgggaacatcccagatttcggaattctcgacgaacccactcccccaccgacaacgtggcttcctcgtgctaagtcttttccagcggaccaacgaccgatcttgcgcacctacaccccatctgcggtccgacccgaactatgcgaagtagacattgatatctatcttcacaacccttcgggaccagtatccagatgggcaaagaactgcagtgttgacgatgaactaatcatcaccggccctgacgtacgcgcaggagaaaccggctacggaatcacctatcatccgacttctgcgatcgatcgcctctgtctcatcggcgattgtgcatcagctcccgcgatcgcaaatatcgtcaatcaatcaaaagtacctactacggttttcctccacgtagacagcctagaagatgatgtattgatcgccgatagctccaccaagctcactttcgaagacatcgacgcttacaaagcaaaggtcttccaatgggcttcagccaatgcagcagatccttcagtacacttctggatcgccggtgaaactagcatggtgcgcttcattcgcaaagaactaatcaacagctaccgagttgattcctcacgaatcactttcctcggctactggaaatacggccgacgaaccgtagactagctttcagattcagaccccag

SEQ ID NO: 190 - protein, 275 aa, Corynebacterium glutamicum
MSTALPDQLKWEYSAFPVQISQKQRLSPGFMRITVTGDKLRFFGQWGLDQRIKLIIPSPAGNIPDFGILDEPTPPPTTWLPRAKSFPADQRPILRTYTPSAVRPELCEVDIDIYLHNPSGPVSRWAKNCSVDDELIITGPDVRAGETGYGITYHPTSAIDRLCLIGDCASAPAIANIVNQSKVPTTVFLHVDSLEDDVLIADSSTKLTFEDIDAYKAKVFQWASANAADPSVHFWIAGETSMVRFIRKELINSYRVDSSRITFLGYWKYGRRTVD

SEQ ID NO: 191 - DNA, 468 bp, Corynebacterium glutamicum
  CDS (101)..(445): RXA00843
gccctgatgcgaaaccggcgccaacaatgatgccgacgaaggcaaatgccactcttaggatttgaataatcatggaacaaaccttagtaggctcaacgttatgaaagtcacgattttccataatccgcgttgttccacatccagaaataccctcgcttacctccgcgacaaggacattgagcctgaaattgttcagtatctcaaagacacgcccaccgcttccgagctcaaagaactattcaatacgctgggaattccagtccacgacggcatcagaacccgcgaagctgagtacacagaactgggcctgtcaccagaaacacctgaaactgagcttatcgacgccatcgttgcccatcccaggctccttcagcgtccgatcgtggtgacggccaaaggcgcgcgcattgcgcgccccaaaatcgacgtcattgacagcatcttgtgacaacattttgtagagcaacc

SEQ ID NO: 192 - protein, 115 aa, Corynebacterium glutamicum
MKVTIFHNPRCSTSRNTLAYLRDKDIEPEIVQYLKDTPTASELKELFNTLGIPVHDGIRTREAEYTELGLSPETPETELIDAIVAHPRLLQRPIVVTAKGARIARPKIDVIDSIL

SEQ ID NO: 193 - DNA, 432 bp, Corynebacterium glutamicum
  CDS (101)..(409): RXA01052
tatggccaaccctagggggatggcctgtgtgttcactgttaggtttcctcaaaatctttaacgaacaacgaagagcttgcccgagagtatcttgggtcgcatggacacaaaattaggcgctgaattgggtactgaatttgatctcattgttgttggtttcggcaaagcaggcaagactatcgcgatgaaacgctcggcagcgggggataaggtcgcactgatcgagcagagtccacagatgtatggcggtacctgcatcaatgtaggttgcatccccacgaagaagttgttgtttgagactgcaacgggcaaggatttcccggatgcggttgtggcgcgtgatcagttgattggcaagctgaatgccaagaatcttgcgatggccacagacaagggtgtcacccgtcattgatggaaaagctacgtttacag

SEQ ID NO: 194 - protein, 103 aa, Corynebacterium glutamicum
MDTKLGAELGTEFDLIVVGFGKAGKTIAMKRSAAGDKVALIEQSPQMYGGTCINVGCIPTKKLLFETATGKDFPDAVVARDQLIGKLNAKNLAMATDKGVTRH

SEQ ID NO: 195 - DNA, 543 bp, Corynebacterium glutamicum
  CDS (101)..(520): RXA01053
ttgcgatggccacagacaagggtgtcacccgtcattgatggaaaagctacgtttacagctagccacgaaatcacaagtaacttcaggtagtgacactcttgtgctgtatgcgccaacgattgtgatcaacacgggctccacgccggtcatccccaatgtcccaggcaccgacaatccgcatgtttttgattccactggcattcagcacatttcgcccctgccgaagcacctcgcgatcatcggcggtggccccatcggtttggaatttgccacgcttttcagtggacaaggctccaaagtcaccatcatcgaccgtggtgaattgccgctgaaaaatttcgacagggaagtagcggagctggccaaaaccgacctggaggcccgcggaatcaccttcctcaacaacgctgaactcaccggattcagcggtgacctcaccatcgcgctcaaagaccacgacctcctcgccgacgccgcactttttgcatcggccgacgcccggcaccgacgggctcggccttgaacaggcgggcatcaaaacag

SEQ ID NO: 196 - protein, 140 aa, Corynebacterium glutamicum
VLYAPTIVINTGSTPVIPNVPGTDNPHVFDSTGIQHISPLPKHLAIIGGGPIGLEFATLFSGQGSKVTIIDRGELPLKNFDREVAELAKTDLEARGITFLNNAELTGFSGDLTIALKDHDLLADAALFASADARHRRARP

SEQ ID NO: 197 - DNA, 612 bp, Corynebacterium glutamicum
  CDS (101)..(589): RXA01054
gacctcctcgccgacgccgcactttttgcatcggccgacgcccggcaccgacgggctcggccttgaacaggcgggcatcaaaacaggcacgcgtggggaggtgcttgtcgacgcccacctccggaccaacatcgacggcatcttcgctgtaggtgatgtcaatggcggcccgcagtttacctacgtgtcctacgatgaccaccgcattgtgctggatcaactagccggaacaggtaagaaatccattgcacaccgactgatccccaccaccacgttcatcgaaccgccgttatccaccatcggtgacaacactgaaggggaaaatgtggtggtgaaaaaggccttgattgcagatatgccgatcgttccccgaccagagattattaaccaacctcacggtatggtgaagtttttcgtcgacaagcaatctgatgcgctgctcggcgcgaccttgtactgcgccgactcccaggagctcatcaacaccgtggcgcttgccatgcggcatggcgtcaccgcctccgagcttggcgacggcatctacacccaccccgccacctcggagatcttcaaccaattattgggcagttaacgcagcggatcgaacggctt

SEQ ID NO: 198 - protein, 163 aa, Corynebacterium glutamicum
VLVDAHLRTNIDGIFAVGDVNGGPQFTYVSYDDHRIVLDQLAGTGKKSIAHRLIPTTTFIEPPLSTIGDNTEGENVVVKKALIADMPIVPRPEIINQPHGMVKFFVDKQSDALLGATLYCADSQELINTVALAMRHGVTASELGDGIYTHPATSEIFNQLLGS

SEQ ID NO: 199 - DNA, 561 bp, Corynebacterium glutamicum
  CDS (101)..(538): RXN03123
agctctaccaacgcgcctacaccttgaccaacgtggatgccgatgccggtacctttgacctggcttttgtgctgcacgagccgctggggcccgcctcggcgtgggcgacgcgctgcgaggccggggaaagcctgaagtcatgcgctacccaggaattccgttcgccatcccagatccagcgccgcgtggcttccttttcttaggcgatctcacctcttacccagcgatctgctcgattctggagaccttggacggtgaaatccctgcgaccgcgtatcttatcgcccacgatccacttgattacaccttcgattttccccagggcgagcacatcaccgcgcagtggatttccaacgaacaatccttcattgatcacatcgctgacacggattacaccgatttttatacctggatcggcgcggaatcctccgaaacccgtgcggccaagaagcatctgcagacccacgccggcatgcccaagacgcacatgaacgcgcaaggttattggaacaagggcagagccatgggtaaaagcaattaaaagatttttgcttatcgacg

SEQ ID NO: 200 - protein, 146 aa, Corynebacterium glutamicum
VGDALRGRGKPEVMRYPGIPFAIPDPAPRGFLFLGDLTSYPAICSILETLDGEIPATAYLIAHDPLDYTFDFPQGEHITAQWISNEQSFIDHIADTDYTDFYTWIGAESSETRAAKKHLQTHAGMPKTHMNAQGYWNKGRAMGKSN

SEQ ID NO: 201 - DNA, 736 bp, Corynebacterium glutamicum
  CDS (101)..(736): FRXA00993
gctgagctagtgcttttgcgacacacctcttgcgaatgttgattaggttaggcaagccatatttacagggtgttgtgaaagcataagggagcaaggaaacatgggcaagggatttaccggcgctattttgaccgtcatgggcgtgaaatcgcatatcgccaccaccacgggaaaaaccgtgatcaatgaccgcatggtgaccattcattttcattccgagacgctgctcaacacggaaggtgaagtccccggcgattggctgcgtctgtggttcccgcacgagagccgacctggaaagctctaccaacgcgcctacaccttgaccaacgtggatgccgatgccggtacctttgacctggcttttgtgctgcacgagccgctggggcccgcctcggcgtgggcgacgcgctgcgaggccggggaaagcctggaagtcatgcgctacccaggaattccgttcgccatcccagatccagcgccgcgtggcttccttttcctaggcgatctcacctcttacccagcgatctgctcgattctggagaccttggacggtgaaatccctgcgaccgcgtatcttatcgcccacgatccacttgattacaccttcgattttccccagggcgagcacatcaccgcgcagtggatttccaacgaacaatccttcattgatcacatcgctgacacggattacaccgatttttatacctggatcggcgcggaatcctccgaaacccgt

SEQ ID NO: 202 - protein, 212 aa, Corynebacterium glutamicum
MGKGFTGAILTVMGVKSHIATTTGKTVINDRMVTIHFHSETLLNTEGEVPGDWLRLWFPHESRPGKLYQRAYTLTNVDADAGTFDLAFVLHEPLGPASAWATRCEAGESLEVMRYPGIPFAIPDPAPRGFLFLGDLTSYPAICSILETLDGEIPATAYLIAHDPLDYTFDFPQGEHITAQWISNEQSFIDHIADTDYTDFYTWIGAESSETR

SEQ ID NO: 203 - DNA, 732 bp, Corynebacterium glutamicum
  CDS (101)..(709): RXA01051
tgcgacccaagatactctcgggcaagctcttcgttgttcgttaaagattttgaggaaacctaacagtgaacacacaggccatccccctagggttggccatatgtcaaccattcacgcctccggaatccaggctccacaagtgccacacggttcccaccatgccccgccacaaaaggacgaatcagtgaagaagagcttcaatgcctcttctttactgttcgcgttttccttcggcgtgtacctggtgctgcttgtgatgatgacacttcttaaaagtcgcctttctttaggcggactgtggaacacagaagcacaccaatacagatccatcgacttagagcttttcaacggctttgctgatccaccaatttggtgggggccttggaccaacacttttggcaacatcgcactgttcatgccatttgggtttttcctgtacaaaatgctccgtagattcaaccatcgattccccttcgtagaaaccatcctgtttgccagcgtcaccagcctcagtatcgaagttctgcaatgggtgtttgctattggatattcagatgtcgatgacctgttgtttaatacgatcggcggactcattggagcatccgtagcagcgcttgtctcgcttaaatcctccaaggtagtcagcggaatcatcatgggcggttcactatctgtgatggcgatgatgatgtattcaagttttatcgcctagaaggtttcagcagttccgct

SEQ ID NO: 204 - protein, 203 aa, Corynebacterium glutamicum
MSTIHASGIQAPQVPHGSHHAPPQKDESVKKSFNASSLLFAFSFGVYLVLLVMMTLLKSRLSLGGLWNTEAHQYRSIDLELFNGFADPPIWWGPWTNTFGNIALFMPFGFFLYKMLRRFNHRFPFVETILFASVTSLSIEVLQWVFAIGYSDVDDLLFNTIGGLIGASVAALVSLKSSKVVSGIIMGGSLSVMAMMMYSSFIA

SEQ ID NO: 205 - DNA, 1359 bp, Corynebacterium glutamicum
  CDS (101)..(1336): RXN01873
ccgtcgttgcccatggtcacagcctacatgcacaaagtgaatcaaaaacagctatttctaacattttactaatatttgctgttggcgcatgatgaactccatgagccaagcaatagatagcaaggtcgaggcacacgaaggccacgaaggccacgaaggcatcgagcgaggaacacgcaattacaagcgcgctgtgtttgcgatgctggccgccggtcttgctgctttcaatggtctttattgcacgcaggcattgcttcccaccatgacggaagagttgggaattacgcccactgagtccgcgctgacggtgtcggctacgactggaatgttggcgctgtgtattgttccggcgtcgatactttcggagaaatttggtcgcggtcgggtgctgacaatttcactcacgttggccatcatcgtgggattaattttgccgcttgtccccaatattactgctctcatcctgctcagaggtctccaaggtgcgctgcttgctggcactccagcggtggcgatgacctggttgtctgaggaaattcaccccaaggatattgggcatgcgatgggaatttacatcgcgggaaatactgtcggcgggctcactggacgtatgattccggcgggactacttgaagtaactcattggcaaaacgcactgctgggaagttctatcgctgcgctgatcttcggcgtaatcatggtggtgttgcttcccaagcagcggaaattccagccgaagaatatcaatctgcgccatgagatttcggcgatggctgctcattggcggaatcctcgtttggcgttgctttttggtactgcgtttttgggcatgggtacttttgtgtcgctgtacaactatttgggtttccgcatgattgatcagtttgggctgagtgaagtgctggttggtgcggtgttcatcatgtatctggccgggacctggagttccacccaggcgggtgcgttgagggagaagatcggcaatgggtcaacggttattttcttgagtctgacgatgatcgcgtcgatggcactgatggggattaataatttgtgggtcacgttggttgccctgtttgtgtttaccgcggcatttttcgcactgcattccagtgcttcgggatggatcggaatcatcgcaacgaaggatcgcgcggaagcctccagcatgtatttgttctgttattacgtgggatcctcggtgattggttgggtttctggattcgcgtttacgcatttgccgtggttggcgttcattggctggttgattctgcttctttgcggagtgctggcgatttgtgtgacgctggcaaggcttgcccgcaacgccaattaatacgagtttgtccgtgttta

SEQ ID NO: 206 - protein, 412 aa, Corynebacterium glutamicum
MSQAIDSKVEAHEGHEGHEGIERGTRNYKRAVFAMLAAGLAAFNGLYCTQALLPTMTEELGITPTESALTVSATTGMLALCIVPASILSEKFGRGRVLTISLTLAIIVGLILPLVPNITALILLRGLQGALLAGTPAVAMTWLSEEIHPKDIGHAMGIYIAGNTVGGLTGRMIPAGLLEVTHWQNALLGSSIAALIFGVIMVVLLPKQRKFQPKNINLRHEISAMAAHWRNPRLALLFGTAFLGMGTFVSLYNYLGFRMIDQFGLSEVLVGAVFIMYLAGTWSSTQAGALREKIGNGSTVIFLSLTMIASMALMGINNLWVTLVALFVFTAAFFALHSSASGWIGIIATKDRAEASSMYLFCYYVGSSVIGWVSGFAFTHLPWLAFIGWLILLLCGVLAICVTLARLARNAN

SEQ ID NO: 207 - DNA, 1215 bp, Corynebacterium glutamicum
  CDS (101)..(1192): FRXA01873
ccgtcgttgcccatggtcacagcctacatgcacaaagtgaatcaaaaacagctatttctaacattttactaatatttgctgttggcgcatgatgaactccatgagccaagcaatagatagcaaggtcgaggcacacgaaggccacgaaggccacgaaggcatcgagcgaggaacacgcaattacaagcgcgctgtgtttgcgatgctggccgccggtcttgctgctttcaatggtctttattgcacgcaggcattgcttcccaccatgacggaagagttgggaattacgcccactgagtccgcgctgacggtgtcggctacgactggaatgttggcgctgtgtattgttccggcgtcgatactttcggagaaatttggtcgcggtcgggtgctgacaatttcactcacgttggccatcatcgtgggattaattttgccgcttgtccccaatattactgctctcatcctgctcagaggtctccaaggtgcgctgcttgctggcactccagcggtggcgatgacctggttgtctgaggaaattcaccccaaggatattgggcatgcgatgggaatttacatcgcgggaaatactgtcggcgggctcactggacgtatgattccggcgggactacttgaagtaactcattggcaaaacgcactgctgggaagttctatcgctgcgctgatcttcggcgtaatcatggtggtgttgcttcccaagcagcggaaattccagccgaagaatatcaatctgcgccatgagatttcggcgatggctgctcattggcggaatcctcgtttggcgttgctttttggtactgcgtttttgggcatgggtacttttgtgtcgctgtacaactatttgggtttccgcatgattgatcagtttgggctgagtgaagtgctggttggtgcggtgttcatcatgtatctggccgggacctggagttccacccaggcgggtgcgttgagggagaagatcggcaatgggtcaacggttattttcttgagtctgacgatgatcgcgtcgatggcactgatggggattaataatttgtgggtcacgttggttgccctgtttgtgtttaccgcggcatttttcgcactgcattccagtgcttcgggatggatcggaatcatcgcaacgaaggatcgcgcggaagcctccagcatgtatttgttctgtgaatactaggatcctcggtgattggttgg

SEQ ID NO: 208 - protein, 364 aa, Corynebacterium glutamicum
MSQAIDSKVEAHEGHEGHEGIERGTRNYKRAVFAMLAAGLAAFNGLYCTQALLPTMTEELGITPTESALTVSATTGMLALCIVPASILSEKFGRGRVLTISLTLAIIVGLILPLVPNITALILLRGLQGALLAGTPAVAMTWLSEEIHPKDIGHAMGIYIAGNTVGGLTGRMIPAGLLEVTHWQNALLGSSIAALIFGVIMVVLLPKQRKFQPKNINLRHEISAMAAHWRNPRLALLFGTAFLGMGTFVSLYNYLGFRMIDQFGLSEVLVGAVFIMYLAGTWSSTQAGALREKIGNGSTVIFLSLTMIASMALMGINNLWVTLVALFVFTAAFFALHSSASGWIGIIATKDRAEASSMYLFCEY

SEQ ID NO: 209 - DNA, 1572 bp, Corynebacterium glutamicum
  CDS (101)..(1549): RXN00034
taaattttgtggcactccccacatttctatcaatctatagaaagtatgacttaaagtcgattttgcaagtttctatagattgatagaaaagggagtttagatgtcttacacatcttttaaaggcgatgataaagccctcatcggcatagttttatcagttctcacattttggctttttgctcagtcaaccctaaatatcggcccagatatggcaactgatttagggatgagcgatggcaccatgaacatagctgtcgtggccgccgcgttattctgtggaacatttatcgtcgcagccggcggcatcgcagatgtctttggccgagtacgaatcatgatgattggcaacatccttaacatcctgggatctctcctcatcgccacggcaacgacttctttagccacccaaatggtgatcaccggccgagttctccaaggactggcagcagcggccatcatgtctgcatccctagcattagttaagacatattggttaggtactgaccgccaacgagcagtctccatttggtccattggttcatggggtggcaccggattctgcgcgcttttcgcgggtcttgttgtagcaagcccctttggttggagaggaatcttcgccctctgcgcgatcgtctccatcgttgctattgcccttacccgccacatcccggaatcccgtccggctcaatccattggcatgcatttggattggagtggcatcatcgttcttgccctcagtgttctatctcttgaattgtttattacccaaggtgaatcacttggctggacgcactggatgacctggactctccttgccgtttctttgacatttcttgcagttttcgtcttcattgaacgcatcgccagctggccagttctcgacttcaaccttttcaaagaccacgccttcagcggtgcgaccatcaccaacttcattatgagcgctactggcggagtagttgccgttgtcatgtgggttcagcaaatgggatggggtgtctccccaacaatctcgggactcaccagcatcggcttcgcagcctttgtcatccttttcattcgagttggagaaaaggccatgcagaaagttggcgcccgagcagtgatcatcaccgctggcatcttggtagcgaccgcgaccgccctcctaatgatcaccgcggtcagcgagtcaacgtacatcgtcatctccctcgccggcttctccctttatggccttggcctcggactcttcgccaccccagtcaccgatactgcgcttggaacacttcccaaagaccgtaccggcgctggtgcaggtgtattcaagatgtcctcttccctcggcgcagcactcggcatcgcaatctccacttcagtgttcctcgcacttcgcgacggcacctccatcaactccgacgtcgcactcgccggaacagtttcacttggcatcaacgttgtattcgcagcaacagccaccatcaccgcagcagtccttattccaaaagccgctggcaaagtctcacaaaccagcatcacccttcctgagccagctatcgctgtaaaaatctaaaacttcaccaggacagataa

SEQ ID NO: 210 - protein, 483 aa, Corynebacterium glutamicum
MSYTSFKGDDKALIGIVLSVLTFWLFAQSTLNIGPDMATDLGMSDGTMNIAVVAAALFCGTFIVAAGGIADVFGRVRIMMIGNILNILGSLLIATATTSLATQMVITGRVLQGLAAAAIMSASLALVKTYWLGTDRQRAVSIWSIGSWGGTGFCALFAGLVVASPFGWRGIFALCAIVSIVAIALTRHIPESRPAQSIGMHLDWSGIIVLALSVLSLELFITQGESLGWTHWMTWTLLAVSLTFLAVFVFIERIASWPVLDFNLFKDHAFSGATITNFIMSATGGVVAVVMWVQQMGWGVSPTISGLTSIGFAAFVILFIRVGEKAMQKVGARAVIITAGILVATATALLMITAVSESTYIVISLAGFSLYGLGLGLFATPVTDTALGTLPKDRTGAGAGVFKMSSSLGAALGIAISTSVFLALRDGTSINSDVALAGTVSLGINVVFAATATITAAVLIPKAAGKVSQTSITLPEPAIAVKI

SEQ ID NO: 211 - DNA, 1045 bp, Corynebacterium glutamicum
  CDS (101)..(1045): FRXA02273
taaattttgtggcactccccacatttctatcaatctatagaaagtatgacttaaagtcgattttgcaagtttctatagattgatagaaaagggagtttagatgtcttacacatcttttaaaggcgatgataaagccctcatcggcatagttttatcagttctcacattttggctttttgctcagtcaaccctaaatatcggcccagatatggcaactgatttagggatgagcgatggcaccatgaacatagctgtcgtggccgccgcgttattctgtggaacatttatcgtcgcagccggcggcatcgcagatgtctttggccgagtacgaatcatgatgattggcaacatccttaacatcctgggatctctcctcatcgccacggcaacgacttctttagccacccaaatggtgatcaccggccgagttctccaaggactggcagcagcggccatcatgtctgcatccctagcattagttaagacatattggttaggtactgaccgccaacgagcagtctccatttggtccattggttcatggggtggcaccggattctgcgcgcttttcgcgggtcttgttgtagcaagcccctttggttggagaggaatcttcgccctctgcgcgatcgtctccatcgttgctattgcccttacccgccacatcccggaatcccgtccggctcaatccattggcatgcatttggattggagtggcatcatcgttcttgccctcagtgttctatctcttgaattgtttattacccaaggtgaatcacttggctggacgcactggatgacctggactctccttgccgtttctttgacatttcttgcagttttcgtcttcattgaacgcatcgccagctggccagttctcgacttcaaccttttcaaagaccacgccttcagcggtgcgaccatcaccaacttcattatgagcgctactggcggagtagttgccgttgtcatgtgggttcagcaaatgggatggggtgtctccccaacaatctcgggactcaccagcatcggcttcgcagccttt

SEQ ID NO: 212 - protein, 315 aa, Corynebacterium glutamicum
MSYTSFKGDDKALIGIVLSVLTFWLFAQSTLNIGPDMATDLGMSDGTMNIAVVAAALFCGTFIVAAGGIADVFGRVRIMMIGNILNILGSLLIATATTSLATQMVITGRVLQGLAAAAIMSASLALVKTYWLGTDRQRAVSIWSIGSWGGTGFCALFAGLVVASPFGWRGIFALCAIVSIVAIALTRHIPESRPAQSIGMHLDWSGIIVLALSVLSLELFITQGESLGWTHWMTWTLLAVSLTFLAVFVFIERIASWPVLDFNLFKDHAFSGATITNFIMSATGGVVAVVMWVQQMGWGVSPTISGLTSIGFAAF

SEQ ID NO: 213 - DNA, 826 bp, Corynebacterium glutamicum
  CDS (101)..(826): RXN03075
tgtgcaaaattgcattcaggctgaaaaattcctaaagggactccgtccgaataattggaaagcccagaagaacagtcaactcctagattaaaggataatcgtggcgaaattcctgtataagttaggctccacggcctatcaaaagaaatggccgtttcttgcggtctggctcgtgattctcataggtatcacgacgctggcggggctgtatgccaagccaacgtcgagtagcttctctatccctggtcttgattctgtcacgaccatggagaagatgcaggagcgtttccctggttcggatgatgcaacatcggctcccactggttctgtcgtcattcaggcaccggaaggcaagaccctcactgatcctgaggttggggctgaagtaaaccagatgcttgatgaggttcgggcgactggtgtgctgaaggatgctgattccgttgtggatcctgtgttggctgcgcagggtgtggctgctcagatgaccccagccctggaggctcagggtgtacctgcggagaagatcgccgcagatattgagtcgattagtccactgagtgcagatgagactaccggcatcatctcgatgacttttgatgcagattctgccatggatatatccgcagaggatcgtgagaaggtcaccaatattcttgatgaatacgatgacggcgatctgactgttgtctacaacggcaacgtgtttggcgcagctgcaaccagcttggacatgacctctgagctcatcggcctgctggtggctgcggtcgttcttatcgtgaccttcggttcgttcatcgctgccggtatgccgctgatctct

SEQ ID NO: 214 - protein, 242 aa, Corynebacterium glutamicum
VAKFLYKLGSTAYQKKWPFLAVWLVILIGITTLAGLYAKPTSSSFSIPGLDSVTTMEKMQERFPGSDDATSAPTGSVVIQAPEGKTLTDPEVGAEVNQMLDEVRATGVLKDADSVVDPVLAAQGVAAQMTPALEAQGVPAEKIAADIESISPLSADETTGIISMTFDADSAMDISAEDREKVTNILDEYDDGDLTVVYNGNVFGAAATSLDMTSELIGLLVAAVVLIVTFGSFIAAGMPLIS

SEQ ID NO: 215 - DNA, 826 bp, Corynebacterium glutamicum; identical to SEQ ID NO: 213
  CDS (101)..(826): FRXA02907

SEQ ID NO: 216 - protein, 242 aa, Corynebacterium glutamicum; identical to SEQ ID NO: 214

SEQ ID NO: 217 - DNA, 2313 bp, Corynebacterium glutamicum
  CDS (101)..(2290): RXA00479
tagatcccaaggctcaaaatttattacttaaacaagttgagcaactagccagccgcaaatcttagaactaacctttacgcctttaacggaagtgaatttgatgtctactagcatcacaacagagaacaagaagaaatctggtcctcctcgcttgatgagaatctttctgcccgccttgctaattttagtttggcttgtaggagctggagtcggcggtccttattttggcaaggttagtgaggtctcctccaacagccagaccacatatctgccagaatctgccgatgccactcaagtacaggaacagttgggagattttactgattctgaatccatcccagccattgtcgtaatggtcagcgatgaacccttaacacagcaagacatcacacaactcaatgaagttgttgctgggctttcagaattagacatagtttccgatgaagtctcccctgctattccatccgaggacggcagagctgtccaagtgtttgtccccctcaatccatcagcggagctgacggaaagcgtcgagaagctctctgagaccttgacccagcaaacgccggactatgtgagcacctatgtgaccggaccggctgggtttaccgctgatctcagcgcagctttcgcgggtattgatgggctactcctagcagtcgccttggctgccgtccttgtcattcttgtcatcgtctatcgctccttcattctgcccatcgccgtgcttgccaccagtttgtttgcgctgactgtagctctattggtggtgtggtggctagctaagtgggacatcctgctgctttcgggtcagactcaaggcatcctcttcattctggtcattggcgccgccaccgactactcattgctatacgttgctcgtttccgtgaagagttacgcgttcaacaagataaagggatagccacagggaaagccatccgggcatcggtggaacccattcttgcctcgggcagcactgttattgcgggcctcctttgtttgctatttagtgatttgaaatctaactccacgctaggtccagtagcttcggtgggcattatttttgcaatgctttctgctcttactctgctaccagccctgctgtttgtattcggtcgggtggccttttggcccaagcgaccaaaatacgaacctgaaaaagcccgtgcgaaaaacgacatccccgccagcgggatctggtcaaaagtggctgatttagtggagcagcatcctcgtgcaatctgggtatctacacttattgtgcttctcttgggtgcggctttcgttcccacactaaaagcggacggtgtgtcccaatccgacctagttctgggttcctctgaagcacgtgatggccagcaggctttaggcgaacacttccccggtggatccggcagtcctgcttatattatcgttgatgaaacacaggcagcacaggctgctgacgtagtccttaacaacgacaatttcgagactgtaactgtaactagtgctgactccccctctggctcagccccaatcaccgctgacggtattgtgccgttaggttctggtacagctccaggcccggtagttgtagaagggcaagtccttttacaagcaacacttgtcgaagcaccagattccgaagaagctcaaaaagctattcgcagtatccgccaaacttttgcagatgaaaatatatcagcggtagtaggcggtgtcactgcaacttccgtagacactaacgatgcctccatccatgaccgcaacctgatcatcccaattgtattgctggtcattttggttattctcatgctgttgctgcggtctattgtcgcaccactcctgctagtagtcaccaccgtggtgtcttttgctactgctttaggcgtggctgctttacttttcaatcacgttttcagtttcccaggagcagaccccgcagtacctctctacggatttgtatttttagtagccttgggcatcgactacaacattttcttagtcacccgaatccgtgaagaaaccaaaacccacggcacaagacttggaattcttcgaggcctgacagtaaccggcggagtaattacctcagctggagtagttctcgccgcaacgttcgcagcactctatgtcatcccaattctattcctggcacaaattgccttcattgtcgcttttggagttcttattgataccctgctcgttcgcgccttcttggtgcctgctttgttctacgacatcggaccgaaaatctggtggccgtcaaaattgtccaatcagaaataccagaagcagcctcagctatgacacaccaaaattcgcctctc

SEQ ID NO: 218 - protein, 730 aa, Corynebacterium glutamicum
MSTSITTENKKKSGPPRLMRIFLPALLILVWLVGAGVGGPYFGKVSEVSSNSQTTYLPESADATQVQEQLGDFTDSESIPAIVVMVSDEPLTQQDITQLNEVVAGLSELDIVSDEVSPAIPSEDGRAVQVFVPLNPSAELTESVEKLSETLTQQTPDYVSTYVTGPAGFTADLSAAFAGIDGLLLAVALAAVLVILVIVYRSFILPIAVLATSLFALTVALLVVWWLAKWDILLLSGQTQGILFILVIGAATDYSLLYVARFREELRVQQDKGIATGKAIRASVEPILASGSTVIAGLLCLLFSDLKSNSTLGPVASVGIIFAMLSALTLLPALLFVFGRVAFWPKRPKYEPEKARAKNDIPASGIWSKVADLVEQHPRAIWVSTLIVLLLGAAFVPTLKADGVSQSDLVLGSSEARDGQQALGEHFPGGSGSPAYIIVDETQAAQAADVVLNNDNFETVTVTSADSPSGSAPITADGIVPLGSGTAPGPVVVEGQVLLQATLVEAPDSEEAQKAIRSIRQTFADENISAVVGGVTATSVDTNDASIHDRNLIIPIVLLVILVILMLLLRSIVAPLLLVVTTVVSFATALGVAALLFNHVFSFPGADPAVPLYGFVFLVALGIDYNIFLVTRIREETKTHGTRLGILRGLTVTGGVITSAGVVLAATFAALYVIPILFLAQIAFIVAFGVLIDTLLVRAFLVPALFYDIGPKIWWPSKLSNQKYQKQPQL

SEQ ID NO: 219 - DNA, 983 bp, Corynebacterium glutamicum
  CDS (1)..(960): RXN03124
atgactcctaccctggcgtcgatgattggtctggctgtcggtatcgactacgcgctatttatcgtgtcccgtttccgcaatgagttgatttctcagactggcgctaatgatctggagccaaaggaattggctgagcgtctgcgcaccatgccgttggctgctcgtgcgcatgcgatgggaatggctgtgggcactgcgggttctgcggttgtattcgcgggtaccacggtgctgatcgctctggttgctctgtcgatcattaatattccatttctaaccgtgatggccattgctgccgcaatcaccgttgccatcgcagttctggttgctctgtccttcctcccagctctgcttggcctgcttggcactcgcatcttcgcagcacgcgtgcctggacctaaggttccggatcctgaggacgagaagccaacgatgggtctgaagtgggtccgccttgtgcgcaagatgccggtggcttacctgctggttggcgtcgttttgcttggtgcaatcgcaattcctgcgaccaatatgcgcctggccatgccgactgatggcacctccacgctgggcaccgcgccgcgcacggggtatgacatgacggcagatgcgttcggcccgggccgcaacgcgcccatgattgcgcttatcgacgcaaccgacgtccctgaggaagaacgcccattggtgtttggacaggcggtggagcaattcttgaacactgatggtgtgaagaatgctcagatcactcagaccacggagaatttcgataccgcgcagatcctgttaccccagaatttgatgcgatcgatgagcgcacctctgagactctcgcaactcttcgtgcagatgctgagaccttcgctgatgacaccggcgcgacgtatggcattactggcgtcaccccaatttacgatgacatctctgctcgcctcggcgacgtcctggttccttacgttctgatcgttttggttctagcgttc

SEQ ID NO: 220 - protein, 320 aa, Corynebacterium glutamicum
MTPTLASMIGLAVGIDYALFIVSRFRNELISQTGANDLEPKELAERLRTMPLAARAHAMGMAVGTAGSAVVFAGTTVLIALVALSIINIPFLTVMAIAAAITVAIAVLVALSFLPALLGLLGTRIFAARVPGPKVPDPEDEKPTMGLKWVRLVRKMPVAYLLVGVVLLGAIAIPATNMRLAMPTDGTSTLGTAPRTGYDMTADAFGPGRNAPMIALIDATDVPEEERPLVFGQAVEQFLNTDGVKNAQITQTTENFDTAQILLPQNLMRSMSAPLRLSQLFVQMLRPSLMTPARRMALLASPQFTMTSLLASATSWFLTF

SEQ ID NO: 221 - DNA, 762 bp, Corynebacterium glutamicum
  CDS (1)..(762): FRXA01180
atgactcctaccctggcgtcgatgattggtctggctgtcggtatcgactacgcgctatttatcgtgtcccgtttccgcaatgagttgatttctcagactggcgctaatgatctggagccaaaggaattggctgagcgtctgcgcaccatgccgttggctgctcgtgcgcatgcgatgggaatggctgtgggcactgcgggttctgcggttgtattcgcgggtaccacggtgctgatcgctctggttgctctgtcgatcattaatattccatttctaaccgtgatggccattgctgccgcaatcaccgttgccatcgcagttctggttgctctgtccttcctcccagctctgcttggcctgcttggcactcgcatcttcgcagcacgcgtgcctggacctaaggttccggatcctgaggacgagaagccaacgatgggtctgaagtgggtccgccttgtgcgcaagatgccggtggcttacctgctggttggcgtcgttttgcttggtgcaatcgcaattcctgcgaccaatatgcgcctggccatgccgactgatggcacctccacgctgggcaccgcgccgcgcacggggtatgacatgacggcagatgcgttcggcccgggccgcaacgcgcccatgattgcgcttatcgacgcaaccgacgtccctgaggaagaacgcccattggtgtttggacaggcggtggagcaattcttgaacactgatggtgtgaagaatgctcagatcactcagaccacggag

SEQ ID NO: 222 - protein, 254 aa, Corynebacterium glutamicum
MTPTLASMIGLAVGIDYALFIVSRFRNELISQTGANDLEPKELAERLRTMPLAARAHAMGMAVGTAGSAVVFAGTTVLIALVALSIINIPFLTVMAIAAAITVAIAVLVALSFLPALLGLLGTRIFAARVPGPKVPDPEDEKPTMGLKWVRLVRKMPVAYLLVGVVLLGAIAIPATNMRLAMPTDGTSTLGTAPRTGYDMTADAFGPGRNAPMIALIDATDVPEEERPLVFGQAVEQFLNTDGVKNAQITQTTE

SEQ ID NO: 223 - DNA, 393 bp, Corynebacterium glutamicum
  CDS (101)..(370): RXA02586
ttctctgagatcgtcatgatgaagtacatcgcgttcggcatgatcgcagcgctgattctggatgccaccatcatccgcatgctgcttgtcccccgccgtgatgcacctgcttcgcgacgacaactggtgggcacccggcttcgttaaaaaggcctacaccgtcatgggtcacggctctgaggtggaggaagcacctcgcccaaccacccgtcgcctcaacgacgatgaggaagtcaccgtgcatgaagcagttgtcgctggcgataccgtggcatctcgcggtggtttgagcacgcaggaaaaccgtgatctggtgtccttcgtggaacttaaggctcgtttggaaaagcgcaggcttgaggatctagattaaatctatgcgaggatttttca

SEQ ID NO: 224 - protein, 90 aa, Corynebacterium glutamicum
MHLLRDDNWWAPGFVKKAYTVMGHGSEVEEAPRPTTRRLNDDEEVTVHEAVVAGDTVASRGGLSTQENRDLVSFVELKARLEKRRLEDLD

SEQ ID NO: 225 - DNA, 2214 bp, Corynebacterium glutamicum
  CDS (101)..(2191): RXA02587
agcctggataacctgccagacggtggcgcatggctgcagccgttccgccctctgactgccttgttatccaaccgccacaattcccaggagtaatccacccgtgttttctaaatggggccactttgcttacagatttaggcgcattgttccgttagtcgtcatcgccgcgattttggctttgtttgtcattttcggcaccaagctgggcgaccgcatgagccaggaaggatgggatgatcctggttcttcctcgaccgctgcggcgcgcatcgagttggagacctttgggcgtgacaatgacggcgatgtcgtgttgctgtttactgcgcctgaaggcacttctttcgatgatgcagaggtgttctccagcatctctggctacttagatgggctaatcgagaacaaccctgatgaagtcagccacatcaacagctactttgacactcgtaatcaaaatctcctcagcaaagacggcacccaaacctttgcagctctcgggctcaaaggtgacggcgagcaaacgctgaaggacttccgggagattgaagatcagctccatccggacaaccttgccggtggcgtcaccactgaggtcgcgggtgccaccgctgtagccgacgcactcgatgagggcatggctggcgatatttcacgcgccgaagtttttgcgctgcctttcgtggctatcttgctgctcatcgtgtttggctcagttgttgccgcggcgatgccattgatcgtgggcattttgtccatcttgggttcgctgggcatcttggcaattttggctggattcttccaggtcaacgtatttgcacaatctgttgtgacccttctgggcttgggtcttgccattgactatggcttattcatggtctctcgtttccgtgaggaaatggataagggcaccccggttgaacaggctgttgccaccactacggcgaccgcgggtaagactgtggtgttctctgcagcgatggtggctgtggcgctgtccgggttgtttgttttcccacaggctttcttgaagtcggtggcattcggtgcgatttccgcggttggccttgctgctttgatgtcggtgacggtgttgccgtcgctgttcagcatgttgggtaagaatatcgataagtggagtttgcgtcgcactgctcgaacagcgcgccgtttggaagacaccatttggtaccgcgtgccggcatgggcaatgcgccatgccaaggcagtgaccgtgggcgtcgtattgctcttgcttgctcttacagtgccgttgacgggcgtgaaattcggcggcatcaatgaaacgtatctgccaccagctaacgacacccgcgtcgcccaagagcgtttcgacgaggcgtttcccgccttccgcaccgagccggtcaagcttgtggtcaccggggcggacaacaaccagctgatcgatatctatgttcaggccaacgaagttgagggactgacagatcgtttcaccgcaggtgcgactaccgatgatggcaccacggtgttgtctactggtattcaggatcgttccctcaatgagcaggtagtggagcagcttcgcgctatttccgtccctgagggcgttgaggtgcagatcggtggcactccagccatggagatcgaatccattgaggcgctctttgaaaagctcctctggatggctctctacattgtgctggccactttcatcctcatggcattggtatttggttcggtgattttgccggcgaaggccatcatcatgaccattctgggtatgggtgccaccttgggtattctcaccttgatgttcgtcgatggcgtgggtgccagcgcattgaacttctcccctggcccactgatgagtccagtgctggtgctgatcatggctattatttacggactttccaccgactatgaggtgttcctggtatctcgcatggtggaggcccgcgataaaggcgaatccaccgacgacgccatcagatacggcactgcacacaccggatctatcatcaccgcggccgcactgatcatgattgtggtctgtggagcgtttggtttctctgagatcgtcatgatgaagtacatcgcgttcggcatgatcgcagcgctgattctggatgccaccatcatccgcatgctgcttgtcccccgccgtgatgcacctgcttcgcgacgacaactggtgggcacccggcttcgttaaaaaggcctacaccgtcatgg

SEQ ID NO: 226 - protein, 697 aa, Corynebacterium glutamicum
VFSKWGHFAYRFRRIVPLVVIAAILALFVIFGTKLGDRMSQEGWDDPGSSSTAAARIELETFGRDNDGDVVLLFTAPEGTSFDDAEVFSSISGYLDGLIENNPDEVSHINSYFDTRNQNLLSKDGTQTFAALGLKGDGEQTLKDFREIEDQLHPDNLAGGVTTEVAGATAVADALDEGMAGDISRAEVFALPFVAILLLIVFGSVVAAAMPLIVGILSILGSLGILAILAGFFQVNVFAQSVVTLLGLGLAIDYGLFMVSRFREEMDKGTPVEQAVATTTATAGKTVVFSAAMVAVALSGLFVFPQAFLKSVAFGAISAVGLAALMSVTVLPSLFSMLGKNIDKWSLRRTARTARRLEDTIWYRVPAWAMRHAKAVTVGVVLLLLALTVPLTGVKFGGINETYLPPANDTRVAQERFDEAFPAFRTEPVKLVVTGADNNQLIDIYVQANEVEGLTDRFTAGATTDDGTTVLSTGIQDRSLNEQVVEQLRAISVPEGVEVQIGGTPAMEIESIEALFEKLLWMALYIVLATFILMALVFGSVILPAKAIIMTILGMGATLGILTLMFVDGVGASALNFSPGPLMSPVLVLIMAIIYGLSTDYEVFLVSRMVEARDKGESTDDAIRYGTAHTGSIITAAALIMIVVCGAFGFSEIVMMKYIAFGMIAALILDATIIRMLLVPRRDAPASRRQLVGTRLR

SEQ ID NO: 227 - DNA, 729 bp, Corynebacterium glutamicum
  CDS (101)..(706): RXN03042
atgacaccggcgcgacgtatggcattactggcgtaccccaatttacgatgacatctctgctcgcctcggcgacgtcctggttccttacgttctgatcgttttggttctagcgttcctcgtgctgttgctcgtgttccggtccatttgggtcccattgatcgcggctctgggctttggcttgtcagttctggctacctttggtgctaccgtggcgatcttccaagaaggtgctttcggcatcatcgacgatcctcagccactgctgtccttcttgccgatcatgctcatcggcctggtatttggtctggccatggattaccagatcttcctcgttactcgtatgcgtgagggcttcaccaagggcaagactgcgggcaacgcaacgtcgaatggtttcaagcacggtgcccgcgtggtcactgctgcggcgctgatcatggtgtctgtgttcgcggcattcatagcgcaggacatggcgtttattaagaccatgggctttgctctggccgttgctgtgttcttcgatgccttcgttgttcgcatgatgattatccctgcaacaatgttcctgcttgatgacaaggcttggtggctacctaagtggttggataagattcttcccaacgttgatgttgaaggtgagggtcttagtgaactacatgaggctcgcaccgaggaactgaaggaaaatgtaggtgtcggggcttagagaaacaaaaaaggctgcta

SEQ ID NO: 228 - protein, 202 aa, Corynebacterium glutamicum
LVLAFLVLLLVFRSIWVPLIAALGFGLSVLATFGATVAIFQEGAFGIIDDPQPLLSFLPIMLIGLVFGLAMDYQIFLVTRMREGFTKGKTAGNATSNGFKHGARVVTAAALIMVSVFAAFIAQDMAFIKTMGFALAVAVFFDAFVVRMMIIPATMFLLDDKAWWLPKWLDKILPNVDVEGEGLSELHEARTEELKENVGVGA

SEQ ID NO: 229 - DNA, 729 bp, Corynebacterium glutamicum; identical to SEQ ID NO: 227
  CDS (101)..(706): FRXA02893

SEQ ID NO: 230 - protein, 202 aa, Corynebacterium glutamicum; identical to SEQ ID NO: 228

SEQ ID NO: 231 - DNA, 1605 bp, Corynebacterium glutamicum
  CDS (101)..(1582): RXA01616
cctacgatttccgacgtcttaaatcgccacacagcgccgtggtctaaaacaccaacaaaagagttgtaactgtaccgaccattcgttacagttacgatccatgacttcagaaaccttacaggcgcaagcgcctacgaaaacccaacgttgggctttcctcgccgttatcagcggtggtctctttctgatcggtgtagacaactcgattctctacaccgcactccctctgctgcgtgaacagctcgcagcctccgaaacccaagcgttgtggatcatcaacgcatatcccctgctcatggcgggccttcgtttgggtgccggcactttgggtgacaaaaacggccaccgccggatgttcctcatgggcttgagcattttcggaatcgcttcacttggtgctgcgtttgctccaactgcgtgggctcttgttgctgcgagagctttccttggcatcggtgcggcaacgatgatgcctgcaaccttggctctgatccgcattacgtttgaggatgagcgtgagcgcaacactgcaattggtatttggggttccgtggcaattcttggcgctgcggcaggcccgatcattggtggtgcgctgttggaattcttctggtggggttcggttttcctcattaacgttccggtggctgttatcgcgttgatcgctacgctttttgtggcgccggccaatatcgcgaatccgtctaagcattgggatttcttgtcgtcgttctatgcgctgctcacacttgctgggttgatcatcacgatcaaggaatctgtgaatactgcacgccatatgcctcttcttttgggtgcagtcatcatgttgatcattggtgcggtgttgtttagcagtcgtcagaagaagatcgaggagccacttctagatctgtcgttgttccgtaatcgccttttcttaggcggtgtggttgctgcgggcatggcgatgtttactgtgtccggtttggaaatgactacctcgcagcgtttccagttgtctgtgggtttcactccacttgaggctggtttgctcatgatcccagctgcattgggtagcttcccgatgtctattatcggtggtgcaaacctgcatcgttggggcttcaaaccgctgatcagtggtggttttgctgccactgccgttggcatcgccctgtgtatttggggcgcgactcatactgatggtttgccgtttttcatcgcgggtctattcttcatgggcgcgggtgctggttcggtaatgtctgtgtcttccactgcgattatcggttccgcgccggtgcgtaaggctggcatggcgtcgtcgatcgaagaggtctcttatgagttcggcacgctgttgtctgtcgcgattttgggtagcttgttcccattcttctactcgctgcatgccccggcagaggttgcggataacttctcggcgggtgttcaccacgcgattgatggcgatgcggcgcgtgcatctttggacaccgcatacattaacgtgttgatcattgccctagtatgcgcagtagcggctgctctgatcagcagttaccttttccgcggaaatccgaagggagccaataatgcgcactagtaaaaaagagatgattctgc

SEQ ID NO: 232 - protein, 494 aa, Corynebacterium glutamicum
MTSETLQAQAPTKTQRWAFLAVISGGLFLIGVDNSILYTALPLLREQLAASETQALWIINAYPLLMAGLRLGAGTLGDKNGHRRMFLMGLSIFGIASLGAAFAPTAWALVAARAFLGIGAATMMPATLALIRITFEDERERNTAIGIWGSVAILGAAAGPIIGGALLEFFWWGSVFLINVPVAVIALIATLFVAPANIANPSKHWDFLSSFYALLTLAGLIITIKESVNTARHMPLLLGAVIMLIIGAVLFSSRQKKIEEPLLDLSLFRNRLFLGGVVAAGMAMFTVSGLEMTTSQRFQLSVGFTPLEAGLLMIPAALGSFPMSIIGGANLHRWGFKPLISGGFAATAVGIALCIWGATHTDGLPFFIAGLFFMGAGAGSVMSVSSTAIIGSAPVRKAGMASSIEEVSYEFGTLLSVAILGSLFPFFYSLHAPAEVADNFSAGVHHAIDGDAARASLDTAYINVLIIALVCAVAAALISSYLFRGNPKGANNAH

SEQ ID NO: 233 - DNA, 1500 bp, Corynebacterium glutamicum
  CDS (101)..(1477): RXA01666
cgacgcgcccctccaccttttcagtagcgtcacgggcgccaatcctgtatttttagcagcagtttgagggtttttgctccccatctttaggagacaccccgtgtccacgtttcataaagttttgatcaacaccatgatctccaacgtcaccactggatttctgttctttgccgtggtgttttggatgtatctttccactggcaacgtcgcactgaccggcatcgtcagtggaatttacatgggtttgatcgccgtttgttccatctttttcggaaccgttgttgatcacaatcgcaagaagtccgtcatgctgttttccagcgtcaccacactcgtgttttattgtctcagtgccctggtgtgggtgttttggctggaggaagacggcctgagcatcggaaataccgccctgtgggtgttcgtttctttcatcctcatcggatcaatcgtggaacacatgcgcaacatcgcactgtccaccgtggtcacgctgttggttcctgaagctgaacgcgacaaagcaaacggcctggtaggagccgtgcaaggtgttggatttttagtcaccagcgtcattgctggttccgccatcgggttcttgggcatggaaatcaccctgtggatctgccttgggctctcacttgtcgcgctgctgcacctgctgccgattcgcgtcgacgaaccggaaatcatcacccaagaagacgcacagcctactgtttctgacgattcagttcccacacctacctccgatttggcgatcgtgtccaaaggcatcgacctaaaaggatcaatgaaaatcatcctgagtgttccgggactgctcgcgcttgtgttgtttgcgtccttcaacaacctcatcggcggcgtgtactccgcactcatggacccttacggcctggaacttttcagcccacagctgtgggggctactgcttggactcaccagcctcggcttcatcgttggtggtgctgtgatctccaaaactggcttgggcaaaaaccctgtgcgcaccttgctgctggttaatgttggtgtggcttttgttggcatgttatttgccattcgcgaatggtggtggctctacatcctgggcattttcatcttcatggctatcaccccagctgccgaagccgcagaacaaaccatccttcaacgagtcgtcccattccgccaacaaggccgcgtatttggactagccatggcagtggaaatggcagccaacccgctctccacagtgatcgtggcgattttggccgaagcctacctcattccatggatggctggccccggcgcggacaccatctggggcgtgatcctcggcgagggtaaagctcgcggcatggcactgatgttcctcgcatcaggtgccatcatgttggttgtcgtgctgttggcattcatgtcgaggtcctaccggaaactcagccagtactacgccaccaccagccaagacattgcgggagctgctgagaagtaagtgctctagaccgttgtttg

SEQ ID NO: 234 - protein, 459 aa, Corynebacterium glutamicum
VSTFHKVLINTMISNVTTGFLFFAVVFWMYLSTGNVALTGIVSGIYMGLIAVCSIFFGTVVDHNRKKSVMLFSSVTTLVFYCLSALVWVFWLEEDGLSIGNTALWVFVSFILIGSIVEHMRNIALSTVVTLLVPEAERDKANGLVGAVQGVGFLVTSVIAGSAIGFLGMEITLWICLGLSLVALLHLLPIRVDEPEIITQEDAQPTVSDDSVPTPTSDLAIVSKGIDLKGSMKIILSVPGLLALVLFASFNNLIGGVYSALMDPYGLELFSPQLWGLLLGLTSLGFIVGGAVISKTGLGKNPVRTLLLVNVGVAFVGMLFAIREWWWLYILGIFIFMAITPAAEAAEQTILQRVVPFRQQGRVFGLAMAVEMAANPLSTVIVAILAEAYLIPWMAGPGADTIWGVILGEGKARGMALMFLASGAIMLVVVLLAFMSRSYRKLSQYYATTSQDIAGAAEK

SEQ ID NO: 235 - DNA, 1521 bp, Corynebacterium glutamicum
  CDS (101)..(1498): RXA00062
cttcaacataggcgttggggctgacttttaaacaggtaccagtagtaccggcataagcgatcactgttgcgttttcttgctgccatcaaaaattagtcacatgattttaagcatcgtccttttgggctacttcatgattctgcttgacacctccatcgtcattacgggtctacctgccatcggcagtgaacttggcatcgatcccgtgcacctgtcatgggtgcagagttcctacacattagtcttcggcgcacttcttctgctgggagctcgtgccggtgatatcttcggccgaaagaaagtgctctacattggtctcgcgttgtttgcggcttcatcgttggcaattgcgctttctccaaatgctgcggtcctcattggagcacgcgtagttcaaggcgcgggagctgcgattatcgctccagcgacacttgcgttgattactgagttcttccccgaaggcccagctcgccttcgtgctacctctgcttatggtgctgttgccggcatcggtgtggcagcaggcctagtgatcggcggcgtatttgctgatcttttgtcgtggcgcatcggcttctttatcaacgtccccatcgccgcagtgttggcctacatagtgcacaaagccattcccgcaaccttcagcaggcctggatcactcgacatcttcggagcaattacctccacggcaggtatcgccgcggtgctctacgcaattgtccgcagcgccgattacagctggacagatccgtttgtgttgatttccctcgtgctgggcatcgcagtgttcatctggttcctgcgccatgaatcctcagccaaagaaccacttctgcccctggggctctttaaaaaccgcaggcgaaacaccatcttggccagccgctttcttctggttggctccgtgatgtcattcttcttctttgccacccagctgttccaggacaccatgggaatgaatgctctccaggcaggccttgcgttcatgccgctatctctgctgcagtttgccagcgccgcgatggtgccacggctttcccgagcaggcgtatctgattccatgctcaccgtcatcggtttcgccatcatggtcatcggcatggcaggcctcgcatttgtaccaaacacgatgatcgcgctgatcctaccaatagttttggtgggatttggccaaggcttcgctttcggaccaatgacagctctggcagttcaaggtgcaccgaaggaccaatccggcgccgtttctggcctggtgaattcccttcaccaaatcggcggcaccttcggtttgggtgtgttctcctccttggctgtcgctgtcatcggacatgatgcaacatcagagatgatcagcgaccgcgcacacttcggattcttgctctccaccgtgacgctgacgctggccaccatctttgcggtcacactgctgaagcgccacgaaacccgaaagagtagcgagcgcccaacccagctcgtcgacgaaaaggcagttacctcttagtgcgctgcagcatcccagtt

SEQ ID NO: 236 - protein, 466 aa, Corynebacterium glutamicum
MILSIVLLGYFMILLDTSIVITGLPAIGSELGIDPVHLSWVQSSYTLVFGALLLLGARAGDIFGRKKVLYIGLALFAASSLAIALSPNAAVLIGARVVQGAGAAIIAPATLALITEFFPEGPARLRATSAYGAVAGIGVAAGLVIGGVFADLLSWRIGFFINVPIAAVLAYIVHKAIPATFSRPGSLDIFGAITSTAGIAAVLYAIVRSADYSWTDPFVLISLVLGIAVFIWFLRHESSAKEPLLPLGLFKNRRRNTILASRFLLVGSVMSFFFFATQLFQDTMGMNALQAGLAFMPLSLLQFASAAMVPRLSRAGVSDSMLTVIGFAIMVIGMAGLAFVPNTMIALILPIVLVGFGQGFAFGPMTALAVQGAPKDQSGAVSGLVNSLHQIGGTFGLGVFSSLAVAVIGHDATSEMISDRAHFGFLLSTVTLTLATIFAVTLLKRHETRKSSERPTQLVDEKAVTS

SEQ ID NO: 237 - DNA, 1584 bp, Corynebacterium glutamicum
  CDS (101)..(1561): RXA00215
cagtgcaaactgaccccgcatcctaaaccgcgccagatttctacctcaaagaattgaaggccttttccaggcgccctcgtgcgtgaaagaataactcaacgtgtctgacaaaaagcaggatctaacatcctccgcagcaggtagtgctgcaccccaaaccaaggcctaccccgccatgcccttgcctgaaaagcaagcttggccagctctaattgccttgtgcattgggtttttcatgatcctgttggatcaaaccatcgtggccgtctctaccccagcgttacaggcagacatgggcgcgtcctacaacgaggtcatctgggtaacctcggtgtatctcctcactttcgcggtgccactgcttgttactggccgtttgggcgacaagtacggtccgaaaaatgtctatgtcgcaggcatggttatcttcacagtgagctctttggcctgtggtttggccccagacatgttcacgttgattatcgctcgtggcgttcaaggtttgggcgcagcccttttgactccacaaaccatggcaacaatcaaccgcatctttgcttttgagcgccgcggtgcagctcttggagtgtggggttctacagctggccttgcatccctagcaggaccgatcctgggtggtgtcatcaccgaaaactggggttggcaatgggtcttctacatcaacgtgcccatcggcgtgatctcggtgatcgcagtaatgaagtacgttcctgaattcccaccgctgacccgaccgcttgatccgctttctatcgtgttgtccatcgtggccgtgttcttcctggtgtttgctttccaggaaggcgaaggcgctggctgggcggcatgggtgtggatcatgatcgtagccgcctttgcgctctttgcgtggtttatctaccaacaaagcagggccgagaaatccggaaacgatcctctcgtcccactggagattttcaagtttagaaacttcagcctcggcaatatctgcatcatggccatgggattcaccgtggctggtactcctctgcccatcatgttgtacttccagcaagcacacggaatgaacgccatggaagcgggtttcatgatggtgcctcaagctctcatggcagcagtactgtcaccatttgttggaaagctggttgatcgatccaaccctggactcatggcagccctcggttttagcacagtggctgtgtccattgtactgctgtcaatggtaatgattttcgatacgggtctagtctgggcacttgtttcgatgactttgctcggcatcggaaacgcctttgtgtgggcaccgaactcgacctccactatgcgcgacctgccacacaagttcatgggagcgggctctggcgtgttcaatacaacccgccaattaggttcagtcatcggcgccgctgccatcggcgcggtaatgcagattcgactggcagcaggcgatgagggcgcagcttttggtcaagcacttctacttgccgctgcggtgctggttatcggcattgtggcatcaacgatggcaggaaaaaatgcacacccagcgccggtaaagccttaaaggtcgcatgaatccttcga

SEQ ID NO: 238 - protein, 487 aa, Corynebacterium glutamicum
VSDKKQDLTSSAAGSAAPQTKAYPAMPLPEKQAWPALIALCIGFFMILLDQTIVAVSTPALQADMGASYNEVIWVTSVYLLTFAVPLLVTGRLGDKYGPKNVYVAGMVIFTVSSLACGLAPDMFTLIIARGVQGLGAALLTPQTMATINRIFAFERRGAALGVWGSTAGLASLAGPILGGVITENWGWQWVFYINVPIGVISVIAVMKYVPEFPPLTRPLDPLSIVLSIVAVFFLVFAFQEGEGAGWAAWVWIMIVAAFALFAWFIYQQSRAEKSGNDPLVPLEIFKFRNFSLGNICIMAMGFTVAGTPLPIMLYFQQAHGMNAMEAGFMMVPQALMAAVLSPFVGKLVDRSNPGLMAALGFSTVAVSIVLLSMVMIFDTGLVWALVSMTLLGIGNAFVWAPNSTSTMRDLPHKFMGAGSGVFNTTRQLGSVIGAAAIGAVMQIRLAAGDEGAAFGQALLLAAAVLVIGIVASTMAGKNAHPAPVKP

SEQ ID NO: 239 - DNA, 1455 bp, Corynebacterium glutamicum
  CDS (101)..(1432): RXN03064
tggagccttgtcttcctccagcaatcccacaacggagcaggttgggatcccgagaaatgttgtcatcatcttggctgtattagtttttacagcctttgtcatgatgttgaatgagactactctggcagtcgcgttgccgtcgatcatggcggactttgacattgaggcgaatactgcgcagtggttgctcactggttttatgttgaccatggctgtggttcttccagctactggttggatgttggaacgttttaccactcgtagtgtgtttattttcgccacggtggtcttcctgatcggtactgtgacggctgcgttgtctcctacttttgcgattatgcttgcagcccgcgtcgctcaggcgattggtaccgctgtgatcatgccgctgctgatgactgtcgcgatgaccgttgttcctccagagcgccgtggcgccgtcatgggtttgattgcggtcgtgatggccgttggtcctgctcttggacctagtgtggctggtttcgtactcagcttgtcttcgtggcacgcgattttctgggtcatggttccgttggtgtttgtggcaagcctgatcggtaccctgcgtctgaccaacgtcagtgagcctaaaaagactcctttggatgttatttccttcctgatttccgcagtggctttcggtggccttgtgtacgccttgagctcgattggcatcattttggaaggtgacagaagcgctttggtcgtgttggctgtcggcatcattgcgttggtggtgtttgtgtggcgccagattgccatgggtaagcaggataaggcgctgttggatctgcgtccgttggcgattcgtgagtacaccattccgctggttgtgcttttgacgctgttcggtgcgctgctcggtgtcatgaatacactgccgctctacctgcagggatccttgatggtcaccgccttggtcgcgggtctagtgctgttgccaggtggtcttttggaaggtgtgctgtcgccatttgtgggtcgaatttatgatcgtcatggtccacgcggactcgtgatcggcggtatgtcactcgttgtgatctccctgtttgcactgtccaccgtcgatgagttcgccaacgtgtggttcatcatcggcgtacacatcgtgttctccatcggccttgcgctgctgttcaccccactgatgacagtcgcgctcgcatccgtccccgacaacatgtacggccacggctccgcgatcctcaacaccctccaacagctcgccggcgccgcaggcaccgcggtcatgattgcggtttattccaccgtcagcaacaacgcgcttatcgacggcgcaacccaacaaaccgccctcgccgacggcgccaactctgcattcttcgcctcagcgtgcgtggcagtgtttgcactgatcgtgggcttctttgtaaagaggccagcccgctaagctaggtcgcatgatcagca

SEQ ID NO: 240 - protein, 444 aa, Corynebacterium glutamicum
MMLNETTLAVALPSIMADFDIEANTAQWLLTGFMLTMAVVLPATGWMLERFTTRSVFIFATVVFLIGTVTAALSPTFAIMLAARVAQAIGTAVIMPLLMTVAMTVVPPERRGAVMGLIAVVMAVGPALGPSVAGFVLSLSSWHAIFWVMVPLVFVASLIGTLRLTNVSEPKKTPLDVISFLISAVAFGGLVYALSSIGIILEGDRSALVVLAVGIIALVVFVWRQIAMGKQDKALLDLRPLAIREYTIPLVVLLTLFGALLGVMNTLPLYLQGSLMVTALVAGLVLLPGGLLEGVLSPFVGRIYDRHGPRGLVIGGMSLVVISLFALSTVDEFANVWFIIGVHIVFSIGLALLFTPLMTVALASVPDNMYGHGSAILNTLQQLAGAAGTAVMIAVYSTVSNNALIDGATQQTALADGANSAFFASACVAVFALIVGFFVKRPAR

SEQ ID NO: 241 - DNA, 1093 bp, Corynebacterium glutamicum
  CDS (101)..(1093): FRXA00565
tggagccttgtcttcctccagcaatcccacaacggagcaggttgggatcccgagaaatgttgtcatcatcttggctgtattagtttttacagcctttgtcatgatgttgaatgagactactctggcagtcgcgttgccgtcgatcatggcggactttgacattgaggcgaatactgcgcagtggttgctcactggttttatgttgaccatggctgtggttcttccagctactggttggatgttggaacgttttaccactcgtagtgtgtttattttcgccacggtggtcttcctgatcggtactgtgacggctgcgttgtctcctacttttgcgattatgcttgcagcccgcgtcgctcaggcgattggtaccgctgtgatcatgccgctgctgatgactgtcgcgatgaccgttgttcctccagagcgccgtggcgccgtcatgggtttgattgcggtcgtgatggccgttggtcctgctcttggacctagtgtggctggtttcgtactcagcttgtcttcgtggcacgcgattttctgggtcatggttccgttggtgtttgtggcaagcctgatcggtaccctgcgtctgaccaacgtcagtgagcctaaaaagactcctttggatgttatttccttcctgatttccgcagtggctttcggtggccttgtgtacgccttgagctcgattggcatcattttggaaggtgacagaagcgctttggtcgtgttggctgtcggcatcattgcgttggtggtgtttgtgtggcgccagattgccatgggtaagcaggataaggcgctgttggatctgcgtccgttggcgattcgtgagtacaccattccgctggttgtgcttttgacgctgttcggtgcgctgctcggtgtcatgaatacactgccgctctacctgcagggatccttgatggtcaccgccttggtcgcgggtctagtgctgttgccaggtggtcttttggaaggtgtgctgtcgccatttgtgggtcgaatttatgatcgtcatggtccacgcggactcgtgatcggcggtatgtcactcgttgtgatctccctgtttgcactgtccaccgtcgat

SEQ ID NO: 242 - protein, 331 aa, Corynebacterium glutamicum
MMLNETTLAVALPSIMADFDIEANTAQWLLTGFMLTMAVVLPATGWMLERFTTRSVFIFATVVFLIGTVTAALSPTFAIMLAARVAQAIGTAVIMPLLMTVAMTVVPPERRGAVMGLIAVVMAVGPALGPSVAGFVLSLSSWHAIFWVMVPLVFVASLIGTLRLTNVSEPKKTPLDVISFLISAVAFGGLVYALSSIGIILEGDRSALVVLAVGIIALVVFVWRQIAMGKQDKALLDLRPLAIREYTIPLVVLLTLFGALLGVMNTLPLYLQGSLMVTALVAGLVLLPGGLLEGVLSPFVGRIYDRHGPRGLVIGGMSLVVISLFALSTVD

SEQ ID NO: 243 - DNA, 380 bp, Corynebacterium glutamicum
  CDS (1)..(357): FRXA02878
tgcctgtccaccgtcgatgagttcgccacgtgttggtcatcattcgcggacacatcgtggttctcatcggcccttgcgctgctgttcaccccactgatgacagtcgcgctcgcatccgtccccgacaacatgtacggccacggctccgcgatcctcaacaccctccaacagctcgccggcgccgcaggcaccgcggtcatgattgcggtttattccaccgtcagcaacaacgcgcttatcgacggcgcaacccaacaaaccgccctcgccgacggcgccaactctgcattcttcgcctcagcgtgcgtggcagtgtttgcactgatcgtgggcttctttgtaaagaggccagcccgctaagctaggtcgcatgatcagca

SEQ ID NO: 244 - protein, 119 aa, Corynebacterium glutamicum
CLSTVDEFATCWSSFADTSWFSSALALLFTPLMTVALASVPDNMYGHGSAILNTLQQLAGAAGTAVMIAVYSTVSNNALIDGATQQTALADGANSAFFASACVAVFALIVGFFVKRPAR

SEQ ID NO: 245 - DNA, 1533 bp, Corynebacterium glutamicum
  CDS (101)..(1510): RXA00648
gtttgccagctattgcatcttgcacaaaatgtgtaccatacacataatgtcatcgagtcctcccgaatcagccacaccacagatcaaatacggcctgctggtggtcactctcgcctcagctggtatcactgtttccctagcgcagaccctggttattccgatcattggtcggttgcccgagatcttcaacaccacggctgctaatgcctcttggatcattactgtgacgctgttggtgggcgcagtggcgactcctgtgatgggcaggcttgcagatatgtacggcaagaaaaagatgatgctcatctcacttgtcccgttcattcttggatcagtgatctgcgctgtgtcggtggatttgattccgatgatcatcggccgtggttttcaggggcttggctctggcctgattcctcttggcatttctctcatgcatgatttgttgccccgggagaaagcagggtctgccattgctttgatgagttcttccatgggcattggcggtgcactcggtctaccgctggctgctgctattgcccagtttgcgtcctggcgggtgctgttctggttcaccgctctggtagcgcttacagttggcgcggtcatttggaaggcgattcctgctagacccaggatcgtgaggagtggcggctttgattatttcggtgctctcggccttgcaatgggacttatcgcattgttgctcgcggtgtccaagggatcagaatggggctggagaagtgccctgaccattgggttattcgtggcagcgctggtgattttggtgggttggggctggttcgaaacccgccagaaatcccctttgattgatctgcgcaccactattcgggcgaccgtgttgatgacaaatattgcgtccatcctcatcggtttcaccatgtatggaatgaatctgatcctgcctcaggtcatgcagctgcctgtaattctgggctacggtctaggccagagcatgcttcagatgggcatctggctgatcccgatgggtctaggcatgatgttgatttcgaatgcaggtgcagccattagcgctgctcatggtcctcgtgtgacgctgacaattgcgggtgttgtgatcgcagtcggttatgcacttactgccacagtgttgttcactatcggcaaccgcacaccgggaggagatgcagacaacgcacttattttgaccaccctggtgctgttctcagtgtgtagtctcgtggtcggtatcggcattggcctggcatttggttccatgcctgccttgatcatgggtgccgtaccagccacggagaaagccgcagcgaatggtttcaactctcttatgcgttcactgggcaccaccggctcatcagctgtcatcggtgcagtgttggccggaatgatgagtggcggagtacccaccttagggggattcatgaccactctgatcatcggatgctgcgccgcgcttgtggctgcggtcatctcctatttcatccccaccacaaccactgtggtggaagcaaaataatcccggcagcgactcgacca

SEQ ID NO: 246 - protein, 470 aa, Corynebacterium glutamicum
VVTLASAGITVSLAQTLVIPIIGRLPEIFNTTAANASWIITVTLLVGAVATPVMGRLADMYGKKKMMLISLVPFILGSVICAVSVDLIPMIIGRGFQGLGSGLIPLGISLMHDLLPREKAGSAIALMSSSMGIGGALGLPLAAAIAQFASWRVLFWFTALVALTVGAVIWKAIPARPRIVRSGGFDYFGALGLAMGLIALLLAVSKGSEWGWRSALTIGLFVAALVILVGWGWFETRQKSPLIDLRTTIRATVLMTNIASILIGFTMYGMNLILPQVMQLPVILGYGLGQSMLQMGIWLIPMGLGMMLISNAGAAISAAHGPRVTLTIAGVVIAVGYALTATVLFTIGNRTPGGDADNALILTTLVLFSVCSLVVGIGIGLAFGSMPALIMGAVPATEKAAANGFNSLMRSLGTTGSSAVIGAVLAGMMSGGVPTLGGFMTTLIIGCCAALVAAVISYFIPTTTTVVEAK

SEQ ID NO: 247 - DNA, 1770 bp, Corynebacterium glutamicum
  CDS (101)..(1747): RXN01320
gtgaatggcacgacatgccacaaggcacgcaagctgatttccaagcctgctgtcgcaaagcaattaaaaatacttttcttcttagaggtggattttcagaatgacatcacaggtcaagccggacgacgaacgtccggtaacaacaatttcaaaaagtggtgcaccttcggcccacacctcagcaccatatggtgcagcagcaactgaagaagctgtcgaggaaaaaaccaaaggtcgcgttggatttatcatcgcagccctcatgttggcgatgcttcttagctccttgggtcagaccattttcggttctgccctgccaacgattgttggtgagcttggcggcgttaaccacatgacctgggtgattaccgccttcctcttgggccagaccatttcattgcctattttcggcaagttgggtgaccagtttggtcgcaaatacctcttcatgtttgccatcgcactgttcgtggtgggttccatcatcggtgctttggctcagaacatgaccaccttgattgtggctcgtgcactgcagggtatcgccggtggtggcttgatgattctttctcaggcaattaccgctgatgtcaccaccgcccgtgagcgtgcaaagtacatgggcatcatgggttccgttttcggactgtcctccatccttggcccattgcttggtggctggttcactgacggtccaggctggcgttggggtctgtggttgaacgttccaatcggcatcatcgcactggttgctatcgctgtgctgctgaaacttccagctcgtgaacgtggcaaggtctccgttgactggttgggaagcatcttcatggctatcgccaccaccgcatttgtcctcgcagtgacctggggtggcaatgaatatgagtgggcatcaccaatgatcatcggtttgttcatcacgacattggtcgctgcgatagtgttcgttttcgtcgaaaagcgtgctgttgacccactggtccccatgggccttttctcgaaccgcaacttcgtgctcaccgccgtcgccggtatcggcgtaggcctgtttatgatgggcaccatcgcgtacatgcctacctacctgcagatggttcatggtctgaacccaacgcaagctggtctgatgctgatcccaatgatgatcggcctgattggtacatccactgtggtgggcaacatcgtgtccaagactggcaagtacaagtggtacccattcatcggcatgctcatcatggtccttgccctagtactgctatcgacgctgacaccttcggcaagcttggctctcattggactgtacttcttcgtcttcggattcggcctgggctgtgcaatgcagattttggttctcatcgtgcagaactccttcccaatcaccatggttggcaccgcgaccggttccaacaacttcttccgccaaatcggtggagcagtaggttccgcactgatcggtggcctgtttatctccaacctgtccgaccgattcaccgaaaacgtccccgcagcagtggcttccatgggtgaagaaggcgcacaatacgcctcagcaatgtccgatttctccggtgcatccaacctcactccacaccttgttgaatcacttccacaagcactccgtgaagcaattcaactttcttacaacgacgccctgacaccaatcttcttggcgctcaccccgatcgcagtagtcgccgcgatcctcctctttttcatccgtgaagatcacctcaaggaaacgcacgaataatgacacacgaaacttccgtc

SEQ ID NO: 248 - protein, 549 aa, Corynebacterium glutamicum
MTSQVKPDDERPVTTISKSGAPSAHTSAPYGAAATEEAVEEKTKGRVGFIIAALMLAMLLSSLGQTIFGSALPTIVGELGGVNHMTWVITAFLLGQTISLPIFGKLGDQFGRKYLFMFAIALFVVGSIIGALAQNMTTLIVARALQGIAGGGLMILSQAITADVTTARERAKYMGIMGSVFGLSSILGPLLGGWFTDGPGWRWGLWLNVPIGIIALVAIAVLLKLPARERGKVSVDWLGSIFMAIATTAFVLAVTWGGNEYEWASPMIIGLFITTLVAAIVFVFVEKRAVDPLVPMGLFSNRNFVLTAVAGIGVGLFMMGTIAYMPTYLQMVHGLNPTQAGLMLIPMMIGLIGTSTVVGNIVSKTGKYKWYPFIGMLIMVLALVLLSTLTPSASLALIGLYFFVFGFGLGCAMQILVLIVQNSFPITMVGTATGSNNFFRQIGGAVGSALIGGLFISNLSDRFTENVPAAVASMGEEGAQYASAMSDFSGASNLTPHLVESLPQALREAIQLSYNDALTPIFLALTPIAVVAAILLFFIREDHLKETHE

SEQ ID NO: 249 - DNA, 841 bp, Corynebacterium glutamicum
  CDS (101)..(841): FRXA01314
gtgaatggcacgacatgccacaaggcacgcaagctgatttccaagcctgctgtcgcaaagcaattaaaaatacttttcttcttagaggtggattttcagaatgacatcacaggtcaagccggacgacgaacgtccggtaacaacaatttcaaaaagtggtgcaccttcggcccacacctcagcaccatatggtgcagcagcaactgaagaagctgtcgaggaaaaaaccaaaggtcgcgttggatttatcatcgcagccctcatgttggcgatgcttcttagctccttgggtcagaccattttcggttctgccctgccaacgattgttggtgagcttggcggcgttaaccacatgacctgggtgattaccgccttcctcttgggccagaccatttcattgcctattttcggcaagttgggtgaccagtttggtcgcaaatacctcttcatgtttgccatcgcactgttcgtggtgggttccatcatcggtgctttggctcagaacatgaccaccttgattgtggctcgtgcactgcagggtatcgccggtggtggcttgatgattctttctcaggcaattaccgctgatgtcaccaccgcccgtgagcgtgcaaagtacatgggcatcatgggttccgttttcggactgtcctccatccttggcccattgcttggtggctggttcactgacggtccaggctggcgttggggtctgtggttgaacgttccaatcggcatcatcgcactggttgctatcgctgtgctgctgaaacttccagctcgtgaacgtggcaaggtctccgttgactggttgggaagcatcttcatggctatcgccacc

SEQ ID NO: 250 - protein, 247 aa, Corynebacterium glutamicum
MTSQVKPDDERPVTTISKSGAPSAHTSAPYGAAATEEAVEEKTKGRVGFIIAALMLAMLLSSLGQTIFGSALPTIVGELGGVNHMTWVITAFLLGQTISLPIFGKLGDQFGRKYLFMFAIALFVVGSIIGALAQNMTTLIVARALQGIAGGGLMILSQAITADVTTARERAKYMGIMGSVFGLSSILGPLLGGWFTDGPGWRWGLWLNVPIGIIALVAIAVLLKLPARERGKVSVDWLGSIFMAIAT

SEQ ID NO: 251 - DNA, 803 bp, Corynebacterium glutamicum
  CDS (1)..(780): FRXA01320
gttgacccactggtccccatgggccttttctcgaaccgcaacttcgtgctcaccgccgtcgccggtatcggcgtaggcctgtttatgatgggcaccatcgcgtacatgcctacctacctgcagatggttcatggtctgaacccaacgcaagctggtctgatgctgatcccaatgatgatcggcctgattggtacatccactgtggtgggcaacatcgtgtccaagactggcaagtacaagtggtacccattcatcggcatgctcatcatggtccttgccctagtactgctatcgacgctgacaccttcggcaagcttggctctcattggactgtacttcttcgtcttcggattcggcctgggctgtgcaatgcagattttggttctcatcgtgcagaactccttcccaatcaccatggttggcaccgcgaccggttccaacaacttcttccgccaaatcggtggagcagtaggttccgcactgatcggtggcctgtttatctccaacctgtccgaccgattcaccgaaaacgtccccgcagcagtggcttccatgggtgaagaaggcgcacaatacgcctcagcaatgtccgatttctccggtgcatccaacctcactccacaccttgttgaatcacttccacaagcactccgtgaagcaattcaactttcttacaacgacgccctgacaccaatcttcttggcgctcaccccgatcgcagtagtcgccgcgatcctcctctttttcatccgtgaagatcacctcaaggaaacgcacgaataatgacacacgaaacttccgtc

SEQ ID NO: 252 - protein, 260 aa, Corynebacterium glutamicum
VDPLVPMGLFSNRNFVLTAVAGIGVGLFMMGTIAYMPTYLQMVHGLNPTQAGLMLIPMMIGLIGTSTVVGNIVSKTGKYKWYPFIGMLIMVLALVLLSTLTPSASLALIGLYFFVFGFGLGCAMQILVLIVQNSFPITMVGTATGSNNFFRQIGGAVGSALIGGLFISNLSDRFTENVPAAVASMGEEGAQYASAMSDFSGASNLTPHLVESLPQALREAIQLSYNDALTPIFLALTPIAVVAAILLFFIREDHLKETHE

SEQ ID NO: 253 - DNA, 1755 bp, Corynebacterium glutamicum
  CDS (101)..(1732): RXN02926
ccctgacaccaatcttcttggcgctcaccccgatcgcagtagtcgccgcgatcctcctctttttcatccgtgaagatcacctcaaggaaacgcacgaataatgacacacgaaacttccgtccccggacctgccgacgcgcaggtcgcaggagatacgaagctgcgcaaaggccgcgcgaagaaggaaaaaactccttcatcaatgacgcctgaacaacaaaagaaagtctggtgggtcctcagcgcgctgatggtcgccatgatgatggcctcccttgaccagatgattttcggcacagccctgccaacaatcgtcggtgaactcggcggcgttgaccacatgatgtgggtcatcaccgcatacctacttgccgaaaccatcatgctgccgatctacggaaagctcggcgacctggttggacgtaaaggtctcttcatcggagccctcggcatcttcctgatcggctccgtcatcggcgggcttgcaggaaatatgacctggttgatcgtcggccgtgccgtacagggcatcggtggcggtggactgatgatcctctcgcaggcaatcatcgcggacgttgttccagcacgtgaacgtggccgctacatgggtgtcatgggtggagtcttcggactctctgcagttcttggcccactactcggtggctggttcaccgaaggaccaggctggcgctgggcattctggatgaacatcccactgggaatcatcgccatcggtgtcgccatttacttcctggacattccaaagaagagcgtcaagttccgctgggattacctgggcactttcttcatgatcgttgccgcaaccagcctgatcctgttcaccacctggggtggatcccagtacgagtggtctgatccaatcatcattggactgatcatcaccaccatcgttgccgctgcactgctggttgttgtggaactgcgcgcaaaagatccattggttccaatgtccttcttccaaaaccgcaacttcacgctcaccaccattgcaggcctgatcctgggtatcgcaatgttcggcatcatcggctaccttccgacctacctccagatggtccacggaatcaacgccaccgaagccggctacatgctgatcccaatgatggtcggcatgatgggtacctccatctggactggtatccgcatctccaacacaggaaagtacaaactcttcccaccaatcggcatggtggttaccttcgtggcactgatcttctttgcccgaatggaagtgtccaccaccctgtggcagatcggaatctacctcttcgtcctcggcgtcggcctgggtctagccatgcaggttctggtcctgatcgttcagaacaccctgccaaccgcggtggtcggatccgcaaccgctgtgaacaacttcttccgtcaaatcggttcctcactcggatccgcgctggtcggtggcatgttcgttggcaacttgggaaccctcatggaagaaagaatgccagcagccatggcacaactttcaccagaagaacaagccgccatggcagcccaaggcggactggactccaacgaattgacgccggcaatcgtcaatcaattgccaaccgcgctccacgatgcgttcgccggttcctacaacgacgcactcatcccagtgttctacgtgatgatgccactgatcggcatcgcgctgcttctcttgctgtttattaagcaagaaaaactacgcgaaaccaccacagactaaacacaaaacaaatgagacct

SEQ ID NO: 254 - protein, 544 aa, Corynebacterium glutamicum
MTHETSVPGPADAQVAGDTKLRKGRAKKEKTPSSMTPEQQKKVWWVLSALMVAMMMASLDQMIFGTALPTIVGELGGVDHMMWVITAYLLAETIMLPIYGKLGDLVGRKGLFIGALGIFLIGSVIGGLAGNMTWLIVGRAVQGIGGGGLMILSQAIIADVVPARERGRYMGVMGGVFGLSAVLGPLLGGWFTEGPGWRWAFWMNIPLGIIAIGVAIYFLDIPKKSVKFRWDYLGTFFMIVAATSLILFTTWGGSQYEWSDPIIIGLIITTIVAAALLVVVELRAKDPLVPMSFFQNRNFTLTTIAGLILGIAMFGIIGYLPTYLQMVHGINATEAGYMLIPMMVGMMGTSIWTGIRISNTGKYKLFPPIGMVVTFVALIFFARMEVSTTLWQIGIYLFVLGVGLGLAMQVLVLIVQNTLPTAVVGSATAVNNFFRQIGSSLGSALVGGMFVGNLGTLMEERMPAAMAQLSPEEQAAMAAQGGLDSNELTPAIVNQLPTALHDAFAGSYNDALIPVFYVMMPLIGIALLLLLFIKQEKLRETTTD

SEQ ID NO: 255 - DNA, 1294 bp, Corynebacterium glutamicum
  CDS (101)..(1294): FRXA01319
ccctgacaccaatcttcttggcgctcaccccgatcgcagtagtcgccgcgatcctcctctttttcatccgtgaagatcacctcaaggaaacgcacgaataatgacacacgaaacttccgtccccggacctgccgacgcgcaggtcgcaggagatacgaagctgcgcaaaggccgcgcgaagaaggaaaaaactccttcatcaatgacgcctgaacaacaaaagaaagtctggtgggtcctcagcgcgctgatggtcgccatgatgatggcctcccttgaccagatgattttcggcacagccctgccaacaatcgtcggtgaactcggcggcgttgaccacatgatgtgggtcatcaccgcatacctacttgccgaaaccatcatgctgccgatctacggaaagctcggcgacctggttggacgtaaaggtctcttcatcggagccctcggcatcttcctgatcggctccgtcatcggcgggcttgcaggaaatatgacctggttgatcgtcggccgtgccgtacagggcatcggtggcggtggactgatgatcctctcgcaggcaatcatcgcggacgttgttccagcacgtgaacgtggccgctacatgggtgtcatgggtggagtcttcggactctctgcagttcttggcccactactcggtggctggttcaccgaaggaccaggctggcgctgggcattctggatgaacatcccactgggaatcatcgccatcggtgtcgccatttacttcctggacattccaaagaagagcgtcaagttccgctgggattacctgggcactttcttcatgatcgttgccgcaaccagcctgatcctgttcaccacctggggtggatcccagtacgagtggtctgatccaatcatcattggactgatcatcaccaccatcgttgccgctgcactgctggttgttgtggaactgcgcgcaaaagatccattggttccaatgtccttcttccaaaaccgcaacttcacgctcaccaccattgcaggcctgatcctgggtatcgcaatgttcggcatcatcggctaccttccgacctacctccagatggtccacggaatcaacgccaccgaagccggctacatgctgatcccaatgatggtcggcatgatgggtacctccatctggactggtatccgcatctccaacacaggaaagtacaaactcttcccaccaatcggcatggtggttaccttcgtggcactgatcttctttgcccgaatggaagtgtccaccaccctgtggcagatcggaatctacctcttc

SEQ ID NO: 256 - protein, 398 aa, Corynebacterium glutamicum
MTHETSVPGPADAQVAGDTKLRKGRAKKEKTPSSMTPEQQKKVWWVLSALMVAMMMASLDQMIFGTALPTIVGELGGVDHMMWVITAYLLAETIMLPIYGKLGDLVGRKGLFIGALGIFLIGSVIGGLAGNMTWLIVGRAVQGIGGGGLMILSQAIIADVVPARERGRYMGVMGGVFGLSAVLGPLLGGWFTEGPGWRWAFWMNIPLGIIAIGVAIYFLDIPKKSVKFRWDYLGTFFMIVAATSLILFTTWGGSQYEWSDPIIIGLIITTIVAAALLVVVELRAKDPLVPMSFFQNRNFTLTTIAGLILGIAMFGIIGYLPTYLQMVHGINATEAGYMLIPMMVGMMGTSIWTGIRISNTGKYKLFPPIGMVVTFVALIFFARMEVSTTLWQIGIYLF

SEQ ID NO: 257 - DNA, 1510 bp, Corynebacterium glutamicum
  CDS (93)..(1487): RXA01578
tgacctcccctcaaccactcactgaaaagagaacactgatgtcacttcctgttcagccgagtaaaacctcggccgccacagtcataccattgatgatcgccctgctggtcgcggtattcgccttccagctcaacgcctccatgctggcgccggcactggccaccatggaaactgaacttaatgcaacagctgcccaaatcggcatgacgcagactgctttcttcaccgcggcggcgctgttttccctgttcctgccacgttggggcgatctgattggtcgccgcaaagtgctggtcggcatgatgattgtcaccggtattggatgtgttgtcgctgcctttgctccgaatgtgaccatcctcttcctgggccgcctgattcaaggtgttgctggcccaaccgtgccactgtgtctgatcattctgcgccagcaggtaaccaatgaaaagcaatatgcgctacttctcggaattgttacctctgtcaacggtggtatcggcggcgtggacgcgcttgctggtggctggttggctgaaacacttggtttccgttccatcttctgggtcatggctgctttctgcgctgtcgctgccctcgcactgcctttcagcgtgaaggaatccaccgctgaagaaaccccgaagatggactggcttggtgtgctgccactggcggtgtccattggatctttgctcatggctttcaacgaggccggcaaactcggtgccgcgaactggattctggtggttgtgctgttcatcatcggtatcgccggagtcatcttcttctacaacattgaaaagcgcgttaagcacccgctggtcagtgttgaatacctcggtcaacgacgcacctgggcattgctgctgagcacccttctcacaatgaccggtgtattcgccgtaatgaatggtctgctgcccaaccttgcgcaggatgctgccaacggtgccggcatgtcagcgagcgtggtgtcctggtggacacttaccccatatgcgctggctggcttggtattcggtccaatcgccggaattctcgccggaaaatttggatacaagatcgtcctgcaaattggtatcgctgccaccatcatcggcgttgccggagccaccttcttagtcggaagcacctcgcatctcgcgtacctcggcatctccatcttcgtgggtattacctatgcaggtattgccaacatcatgctcaacggcctgggcatcgtgctctcccctgctaacaaccaaggctatctgcctggcatgaacgcaggtgccttcaacctaggtgcaggtatttccttcgccatcctcttcgcagtttccacggcattcagtgacaacggcggaggatacgccgcaggcatgtgggctggcgtgatcatcttggtcctagccttcctctgctccctgctgatcccacgcccagaatcaatcaccgatacagtggcagccaaagtccaggctgaagaagccgctcaagccgccagctaaatccacaaactgaactaagg

SEQ ID NO: 258 - protein, 465 aa, Corynebacterium glutamicum
MIALLVAVFAFQLNASMLAPALATMETELNATAAQIGMTQTAFFTAAALFSLFLPRWGDLIGRRKVLVGMMIVTGIGCVVAAFAPNVTILFLGRLIQGVAGPTVPLCLIILRQQVTNEKQYALLLGIVTSVNGGIGGVDALAGGWLAETLGFRSIFWVMAAFCAVAALALPFSVKESTAEETPKMDWLGVLPLAVSIGSLLMAFNEAGKLGAANWILVVVLFIIGIAGVIFFYNIEKRVKHPLVSVEYLGQRRTWALLLSTLLTMTGVFAVMNGLLPNLAQDAANGAGMSASVVSWWTLTPYALAGLVFGPIAGILAGKFGYKIVLQIGIAATIIGVAGATFLVGSTSHLAYLGISIFVGITYAGIANIMLNGLGIVLSPANNQGYLPGMNAGAFNLGAGISFAILFAVSTAFSDNGGGYAAGMWAGVIILVLAFLCSLLIPRPESITDTVAAKVQAEEAAQAAS

SEQ ID NO: 259 - DNA, 1470 bp, Corynebacterium glutamicum
  CDS (101)..(1447): RXA02087
aatcggattcatgctgtgtggtgtgatcagtttgctggctgcggtcgcatggatcttcggccgggagacgctgccaacggcgaaagtcgagcaggtataaatgacgccaattgtggagtccagggcgtggaaagctctgggcgctttaagtgttgggctgtttctcacactgcttgaccaatcgttggtggctgtcgcgctgccaaagattcaagaggatttgggtgcgagcctgaaccaagcggtgtgggtgtcagcggtttatttgctcacttttgcggtgccactgttgattactgggcgcttgggtgatcgttatggacagcgaaatatttatcttgccggcatggctgtgtttaccctcgcggcgttggcctgtgtatttgcaccaagcatcgaatggttgattgctgctcgcgcggtgcagggcctgggcggatctcttcttaatccgcagcccctgagcatcattcacaagattttcgcgcatgatcgtaggggagccgccaccggggtgtggagtgctgttgcctcatcagctggacttttcgggccagttatcggtggtgttctggtggggtggatcagctggcgtgctgtgttcttggtttatgtgccgctcggattgatctccctatttatggtggcgcgttatgtgcctaaacttcccacgggaacctcgaagatcgattggctctcgggtgcggtctcacttgttgctgtacttggtgtggttcttgccttgcagcaggggccagaacttgggtggggaacactgatttgggtgtcccttgccgttggtattgctgcagctgtgctctttatatggatgcaaacaagatccaaggcgccactgatgccgttgaggattttcaagacgcgcaacttcgcgatcggtgcattttcgatcttcagcctgggctttacggtgtattccgttaatttgcccatcatgttgtatctgcaaacggctcagggaatgtcgtcgcagttggccggtttgatgttggttccgatgggcatcatctctgtggtgatgtcaccagtaattggacgattggtggatcgcctggcaccaggaatgatctccaagatcggattcggcgcgctgattttctcgatggcgttgatggctgtctttatgatcgccaacctatcgccgtggtggctactcatcccgattattttgttcggtagctccaacgcgatgagttttgcaccgaactctgtgattgctctgcgtgatgttccgcaggatttagtgggctctgcttctggtttttacaacacctcacgccaggtgggcgctgttttgggcgccgctaccttgggcgctgtgatgcaaataggagtgggcacggtgtccttcggtgttgccatgggtgcggcaatcctggtgacactcgtgcccttaatctttgggttcctagcggtaacccaatttagatagttgctccgattttctcacga

SEQ ID NO: 260 - protein, 449 aa, Corynebacterium glutamicum
MTPIVESRAWKALGALSVGLFLTLLDQSLVAVALPKIQEDLGASLNQAVWVSAVYLLTFAVPLLITGRLGDRYGQRNIYLAGMAVFTLAALACVFAPSIEWLIAARAVQGLGGSLLNPQPLSIIHKIFAHDRRGAATGVWSAVASSAGLFGPVIGGVLVGWISWRAVFLVYVPLGLISLFMVARYVPKLPTGTSKIDWLSGAVSLVAVLGVVLALQQGPELGWGTLIWVSLAVGIAAAVLFIWMQTRSKAPLMPLRIFKTRNFAIGAFSIFSLGFTVYSVNLPIMLYLQTAQGMSSQLAGLMLVPMGIISVVMSPVIGRLVDRLAPGMISKIGFGALIFSMALMAVFMIANLSPWWLLIPIILFGSSNAMSFAPNSVIALRDVPQDLVGSASGFYNTSRQVGAVLGAATLGAVMQIGVGTVSFGVAMGAAILVTLVPLIFGFLAVTQFR

SEQ ID NO: 261 - DNA, 1338 bp, Corynebacterium glutamicum
  CDS (101)..(1315): RXA02088
agagcacccaagcgacattgttcgataatatgttctattattggtattaatactggtcagctagatataaaaggggcgcagggctagccttgggtgtgaaatgttaactcaaaaaatagaattagaggctaaaccaaaaatcccagaggagatctgggtgctggttgtggctgcgtttattattgcgctgggctatggcctgattgcgccgattttgccacagtttgtggtcggttttgatgtaagttttgcagctgccagtgcggtggtgtccatctttgcgggcgcccggttgttgtttgcgccgatgtcggggagtttgatcgataagatcggttcccgtcgtgtgtatctcactggtttactcaccgtggctatcaccacggggcttgttgcgttggcgcaggaatactggcagattctgctgcttcgtggcatcgcaggtattggttccaccatgtttacggtctctgccatgggcctgatcgtgaagatggcgccggtggagatccgcgggcggtgttcgtcggtatatgccagttcgttcctgtttggcaatattattggcccggttgtgggtgctgcgatgtccggtttgggcatgcggtggccgttcgcgatttatggtgcttccgttggcttagctgcacttgttgtgtggtggcggatgccgaaaaccaacgattcacttcggaaggctgatagcaatagtgtgccggcgttgcgctttgctgaggcaattaaggattctgcctaccgctcggcgttgtttagtgcttttgccaatggttggtcgaactttggtgtgcgtgtggcggttcttccactgtttgccgcagctgcatttagcaatggcggagctattgcgggttttgccatggctgcgttcgccgctggaaatgctttgtgtctgcaattcgcgggcgatctctcagatcgcattggccgtaaaccgatgattatttccgggctgatcgtcaatgcagtgttcacggcaatgatcggattcggcacagaagtgtggatcctgatcacggtatctgcgttggcaggtgctggtgcgggcttgcttaatccaagtcagcaggcggtgctcgctgatgttatagattcccgccccggcggaaaagtcttagcgaatttccaaatggcgcaggatttcggtgcgattgttggcccgattctcgtaggcatgatcgcagaacaggcaggcttccaaatcggattcatgctgtgtggtgtgatcagtttgctggctgcggtcgcatggatcttcggccgggagacgctgccaacggcgaaagtcgagcaggtataaatgacgccaattgtggagtc

SEQ ID NO: 262 - protein, 405 aa, Corynebacterium glutamicum
MLTQKIELEAKPKIPEEIWVLVVAAFIIALGYGLIAPILPQFVVGFDVSFAAASAVVSIFAGARLLFAPMSGSLIDKIGSRRVYLTGLLTVAITTGLVALAQEYWQILLLRGIAGIGSTMFTVSAMGLIVKMAPVEIRGRCSSVYASSFLFGNIIGPVVGAAMSGLGMRWPFAIYGASVGLAALVVWWRMPKTNDSLRKADSNSVPALRFAEAIKDSAYRSALFSAFANGWSNFGVRVAVLPLFAAAAFSNGGAIAGFAMAAFAAGNALCLQFAGDLSDRIGRKPMIISGLIVNAVFTAMIGFGTEVWILITVSALAGAGAGLLNPSQQAVLADVIDSRPGGKVLANFQMAQDFGAIVGPILVGMIAEQAGFQIGFMLCGVISLLAAVAWIFGRETLPTAKVEQV

SEQ ID NO: 263 - DNA, 1239 bp, Corynebacterium glutamicum
  CDS (101)..(1216): RXA00764
tactgcgtcggatccgctgatgcttgcagaatcggacagtgatgggccgtctgcgcctgcacctgggacgactggattattaggggtggaattttcgctcatgacactcaagactagcgttttggcactactcttagataacgtgcatgttcttctgattgcgaatcctgagtcgaccacgcagacgcagaaacttttccgtcgtgtggtgcctgcgttgatggcgcttgatggtgtgtcgcttgaagcgaggtttacgcactatggaggccatgcggaggaaatggttgcgggtttgacggtggatgattttgatgtgattatccccgcgggtggggacggcaccgtcaacgaagtgataaatgggttacttgggtcggcggaaggtgattttagaaaccttgaggatttgccggcgattgcggtgttgccaacggggtctgccaatgtgtttgcccgtgcgcttggttaccccactgacccgtatgctgccgctgatgccctggtggagttgattcggaagaaccacaccagaactatcaccttgggtacgtggaagggtgatgatcaggggactcgttggttcgcggttaatgctgggtttggtattgatgcggatgttattgccagggtcgaacgggcgagatctttcggctttgcggcttcaccgttgttgtatctgcaggtgagtcttcgggcgtgggtgaaaactcagattaagccaccgaaaattaccgtggaggcggtggacagcaaagggcacaaattgcaaaaagaggaagtgccaatgctgcttgcctcgaataccaatccgtggacttttttgggtccgcttcctgtggtgacaaatccgcagaattcttttgacacaggtctggggctttttggcttgactagtgtgcgaggattcgggggagtggcagcgatgatgcacctgattggcgtggggcatggtcggaagttggagaagttgatcgctaagcgcaccattgcttttgatgatgcggagaaagtaacgctcacgtgcgacagcgatcagcgtttccaagttgatggtgagtatgaaggcaaaccaacaaaggtggtgttggaatcaatcactgatgcggtgcgagtgtatgcgccgaagacgcatccgacaccgccgatcatgaattgggctgtccatttgtttaagcacgtccgtgatttcctccgggtgcgcacgtttggcatctaggattcatcggagttttcttc

SEQ ID NO: 264 - protein, 372 aa, Corynebacterium glutamicum
MTLKTSVLALLLDNVHVLLIANPESTTQTQKLFRRVVPALMALDGVSLEARFTHYGGHAEEMVAGLTVDDFDVIIPAGGDGTVNEVINGLLGSAEGDFRNLEDLPAIAVLPTGSANVFARALGYPTDPYAAADALVELIRKNHTRTITLGTWKGDDQGTRWFAVNAGFGIDADVIARVERARSFGFAASPLLYLQVSLRAWVKTQIKPPKITVEAVDSKGHKLQKEEVPMLLASNTNPWTFLGPLPVVTNPQNSFDTGLGLFGLTSVRGFGGVAAMMHLIGVGHGRKLEKLIAKRTIAFDDAEKVTLTCDSDQRFQVDGEYEGKPTKVVLESITDAVRVYAPKTHPTPPIMNWAVHLFKHVRDFLRVRTFGI

SEQ ID NO: 265 - DNA, 271 bp, Corynebacterium glutamicum
  CDS (101)..(271): RXN03125
tgacaccggcgcgacgtatggcattactggcgtcaccccaatttacgatgacatctctgctcgcctcggcgacgtcctggttccttacgttctgatcgttttggttctagcgttcctcgtgctgttgctcgtgttccggtccatttgggtcccattgatcgcggctctgggctttggcttgtcagttctggctacctttggtgctaccgtggcgatcttccaagaaggtgctttcggcatcatcgacgatcctcagccactgctgtgcttc

SEQ ID NO: 266 - protein, 57 aa, Corynebacterium glutamicum
LVLAFLVLLLVFRSIWVPLIAALGFGLSVLATFGATVAIFQEGAFGIIDDPQPLLCF

SEQ ID NO: 267 - DNA, 1443 bp, Corynebacterium glutamicum
  CDS (101)..(1420): RXN01553
atgatgatgtcctcagcaagtccaagcgccaagccatgctggaaacaattctcgagctgataccaagccagacttaaatttctaccttaaagtcttgagcatgactgttcaggaattcgaccgcgcgaccaaacccacaccaaaacccccaattgtttcttgggcgttttgggattggggttccgcctctttcaacgcggtcctcgtgacctttattttctcggtctatctcactgattcagtcggcgccaccctccccgagggttccaacgccacatcactgtattcgatggcggtcgccatcgctggcgtcattgttgcggttgttgccccagtcatgggcaggcgatcagatatcaagggcactcgccgcaggtcactgcgcatgtggacacttgtcaccgtgttcttgatgttttgtctctttacagtaaagaacactgatcccacatttttctggtttggtgtagccatcatggcgatcgccaacatcacctttgagttcgctgaagttcagtactatgcgcagctctcccaaatctcgacccgcgaaaacgtgggccgagtttctggtttcggctggtccatgggttacttcggtggcatcgttctactgcttgtttgttacctaggttttgttgccggtgatggcgatacccgcggattcctaaacctgcccatcgaagacggcatgaatatccgcctcgtcgcagtgcttgcagccgtttggttcttggtctctgcgattccggcacttcttcgagtcccagaaattgaggcacaggtagctgccgaagaccaccccaaaggcctcatagctgcctacaaggatctctttgggcagatcgctgagctgtggaaacaagaccgcaactccgtgtatttcctcatcgcagcaactgttttccgtgacggactcgccggagtatttaccttcggtgccatccttgcggtctctgtgtacggactatctgccggtgatgtcctcctcttcggtgtcgcagccaacgtggtctctgcgttgggagcactcctcggaggattcctagacgatcgcgtcgggccaaaacccatcatcttgatttctcttgccatcatgatcgccgatgctgcaattctcttcttcgttgaaggccccactaatttctggatcttcggattaatcctctgtgcgtttgtgggacctgcacagtcagcgtcgagaagctatttaacacgtctttccccagatggccaggaaggccagctcttcggcctttatgccactaccggccgtgccgtgagttggatggtgccgtcgctgtttggtgtatttgtggggctcaccggcgatgaccgcactggtattttggccatcgcgctgattctgctattcggtattgtgctgctgagcatggtgaagccaccgcacaaggtgaagtagacaaagcgcccacaaggatt

SEQ ID NO: 268 - protein, 440 aa, Corynebacterium glutamicum
MTVQEFDRATKPTPKPPIVSWAFWDWGSASFNAVLVTFIFSVYLTDSVGATLPEGSNATSLYSMAVAIAGVIVAVVAPVMGRRSDIKGTRRRSLRMWTLVTVFLMFCLFTVKNTDPTFFWFGVAIMAIANITFEFAEVQYYAQLSQISTRENVGRVSGFGWSMGYFGGIVLLLVCYLGFVAGDGDTRGFLNLPIEDGMNIRLVAVLAAVWFLVSAIPALLRVPEIEAQVAAEDHPKGLIAAYKDLFGQIAELWKQDRNSVYFLIAATVFRDGLAGVFTFGAILAVSVYGLSAGDVLLFGVAANVVSALGALLGGFLDDRVGPKPIILISLAIMIADAAILFFVEGPTNFWIFGLILCAFVGPAQSASRSYLTRLSPDGQEGQLFGLYATTGRAVSWMVPSLFGVFVGLTGDDRTGILAIALILLFGIVLLSMVKPPHKVK

SEQ ID NO: 269 - DNA, 840 bp, Corynebacterium glutamicum
  CDS (101)..(817): RXN00535
aatcgcatggggcaccgtggtcagacaccggatcgcgctccgcaccccaaaagatggctccctaaggagctcacctttactcaatgctctgatgacaccgatgtggtgggcaggcatgagtaccgcgatgctggcatatttcttacaaacagtagcacttggtttcggcaccctcttggtagtgcaaccagtgcttgtcctgtcgctgatgttcacgctgccgctctcagcacgattcaatggctaccgactacgccgaactgaaatcttctgggctaccctcctcaccgtagccgtgggcatcatgatcgttttgggacgcccccttcccggaaacccccaccccccactcgatcgatggattccagtacttttagtcggcgttgcagtaatgggtggaatgtggctgcttgcggaatacgtattaaagaaggacaaagccctcatccttggtcttgtgacgggtgcattgtttggctacgtagcagtgatgtccaaagccgcggtggatctttttgtccatcaaggcataacgggactcatcttgaactgggaaggctacggcctaatcctcaccgcattacttggaacaatcgtgcagcagtattcctttaacgctggcgaactacaaaaatcgctacccgccatgaccattgccgaaccaattgttgccttcagtttgggctacttggttctgggcgaaaaattccaagtcgtggactgggaatggatcgccatgggcatcgcactactggtgatgattgtttccaccattgcactgtctcgtacaagcacaatgccggccggatcgaaaaggtaaaactccaaagttccccccga

SEQ ID NO: 270 - protein, 239 aa, Corynebacterium glutamicum
MWWAGMSTAMLAYFLQTVALGFGTLLVVQPVLVLSLMFTLPLSARFNGYRLRRTEIFWATLLTVAVGIMIVLGRPLPGNPHPPLDRWIPVLLVGVAVMGGMWLLAEYVLKKDKALILGLVTGALFGYVAVMSKAAVDLFVHQGITGLILNWEGYGLILTALLGTIVQQYSFNAGELQKSLPAMTIAEPIVAFSLGYLVLGEKFQVVDWEWIAMGIALLVMIVSTIALSRTSTMPAGSKR

SEQ ID NO: 271 - DNA, 2472 bp, Corynebacterium glutamicum
  CDS (101)..(2449): RXN00453
tagtggggcgtgaaaaaatagctcatttaagaggagaagcaaccccgtggcgaaattgctattcaggttggggcgatggtcctataatcgcaagtggattgtgatttcggcatggctacttattttggccattgttggtggtctggccctgacgatgcagaaggggttcagtaactctttcactattgaagacaccccttcgattgatgccactgtttctctggttgaaaatttccctgatcagacgaacccggtgacggccgccggagttaacgtggttttccaatccccggaaggaaccacgcttgatgatcctcagatgatgactgcgatggatgcagtcgttgattacattgaggacaatttgcctgattttggtgggggagagcgcttcggcaatcctgttgaggtgtctcctgcgttggaagagatggtcatcgagcagatgaccagcatggggcttcctgaggaaaccgctgcaaaggatgctgccaatctggcggtgttgagcgaagacaaaaccattggctacacctctttcaacattgatgttgaggccgcagaatatgtggagcaaaaacaccgcgatgtgatcaacgaagcgatgcaaatcggtgaagatttaggtgtccgggtggaagccggtggacctgctttcggtgatccaattcagattgaaaccaccagtgagatcatcggtattggcatcgcgttcatcgtgttgattttcacctttggttctttgattgctgcaggcttgcctttgattaccgcggtgatcggcgtgggcattggtgcgctggcaattgtgctggccacggcgtttactgatctcaacaatgtgactccagtgctcgcagtgatgattggcctggccgtgggcattgactacgcgctgtttattttgtctaggtaccgtgcggagtataagcgcatgccacgtgccgatgctgccggaatggcggtgggcacagctggtagtgcggtggtgtttgctggcgcgacggtgattatcgcgctggtagccctcatcattgcggatatcggattcctcacggccatgggtatttctgcggcgtttacggtgttcgtggctgtgctcattgcgttgacgtttatcccggcgctgttgggtgtgtttggtggtcatgcgttcaagggcaagatccctggaattggtggaaacccaacgccaaagcagacgtgggagcaagcgcttaatcgtcgttccaagggtcgctcatgggtcaagcttgtacagaaagcaccgggtcttgtggtggcagtggtggtcttgggtcttggtgccttgaccattcctgcaatgaacctgcagttgtcactgccttctgactccacctccaatattgataccactcagcgtcagtcggctgatttgatggcagagggctttggcgcgggcgttaatgcgccgttcttggtcatcgtcgatacgcatgaggtcaatgctgattccaccgcattgcagccactgattgaggcacaggagcctgaagagggcgagttcgatcgggagcaggcggctcgttttgctacctatatgtatgtcacccagacctacaattccaacatcgatgtgaagaatgcgcagatcatcagcgtcaatgatgatttcactgcggcgcagattctcgtgactccatacaccggacctgcggataaagagacccctgagttgatgcacgtgctgcgtgcgcaggaagctcagattgaggatgttacgggaactgaactgggtaccactgggtttacggcggttcagttggacattactgagcagctggaagacgcaatgccggtttacctcgctgtggttgttggtttggctattttcctcctcattctggtgttccgttccctgcttgttccgctggttgctggccttggcttcttgttgtctgtgggtgcggccttcggtgcgacggtgttggtctggcaggagggcttcggtggctttgtgaacacccctggtccgctgatttccttcatgccgatcttcctcatcggcgtgaccttcggtttggccatggactatcaggtgttccttgtgactcgcatgcgcgagcactacacccaccacaatggcaagggacagcctggttccaagtacaccccggttgagcagtcagtgattgaaggcttcacgcagggctcccgcgtggttacagcagcggcactgatcatgattgccgtgttcgtggcgtttattgatcagccgttgccatttattaagatcttcggtttcgcgttgggtgcgggcgtgtttttcgatgctttcttcattcgcatgggtctggtccccgcgtcgatgttcctgatgggcaaggccacgtggtggatgcctaagtggctggatcgaattctgccaagtttggacattgaaggcaccgcactggagaaggaatgggaggagaagcaggctgcacgttagacttggcacctatgtcagat

SEQ ID NO: 272 - protein, 783 aa, Corynebacterium glutamicum
VISAWLLILAIVGGLALTMQKGFSNSFTIEDTPSIDATVSLVENFPDQTNPVTAAGVNVVFQSPEGTTLDDPQMMTAMDAVVDYIEDNLPDFGGGERFGNPVEVSPALEEMVIEQMTSMGLPEETAAKDAANLAVLSEDKTIGYTSFNIDVEAAEYVEQKHRDVINEAMQIGEDLGVRVEAGGPAFGDPIQIETTSEIIGIGIAFIVLIFTFGSLIAAGLPLITAVIGVGIGALAIVLATAFTDLNNVTPVLAVMIGLAVGIDYALFILSRYRAEYKRMPRADAAGMAVGTAGSAVVFAGATVIIALVALIIADIGFLTAMGISAAFTVFVAVLIALTFIPALLGVFGGHAFKGKIPGIGGNPTPKQTWEQALNRRSKGRSWVKLVQKAPGLVVAVVVLGLGALTIPAMNLQLSLPSDSTSNIDTTQRQSADLMAEGFGAGVNAPFLVIVDTHEVNADSTALQPLIEAQEPEEGEFDREQAARFATYMYVTQTYNSNIDVKNAQIISVNDDFTAAQILVTPYTGPADKETPELMHVLRAQEAQIEDVTGTELGTTGFTAVQLDITEQLEDAMPVYLAVVVGLAIFLLILVFRSLLVPLVAGLGFLLSVGAAFGATVLVWQEGFGGFVNTPGPLISFMPIFLIGVTFGLAMDYQVFLVTRMREHYTHHNGKGQPGSKYTPVEQSVIEGFTQGSRVVTAAALIMIAVFVAFIDQPLPFIKIFGFALGAGVFFDAFFIRMGLVPASMFLMGKATWWMPKWLDRILPSLDIEGTALEKEWEEKQAAR

SEQ ID NO: 273 - DNA, 597 bp, Corynebacterium glutamicum
  CDS (101)..(574): RXN00932
cccaattaatttatgcacttcggtgaggttactcacaaagagtagcgtgcaaagcccagcaataaggtgatgtttcaacgattaggttacggtaggggccatgacgccacagaaacttcaccgttttgcagcccttttagaaatgggtacctggaccctgctgatcatcggcatgatcttaaaatacagtggagtgacagacgccgtaacccctattgccggcggtatccacggctttggcttcctctgttttgcagccatcaccatcaccgtgtggatcaataataagtggacattcccgcagggtatcgcaggtttgatcgtctctgttatcccgtgggctgcattgccatttgcattgtgggcagacaagaagggcctcgttgccggcggatggcgcttttcagatccgtccgaaaagccacacactttctttgacaagatcttggctcaattggtcaggcacccaatccgatccattttaattctgctggtgattatcgccgtcgtcttctctatcttgctggcgatgggaccaccttatgatccagatgccatcgcaaacactgtggattaaacaacagcctccttcacatg

SEQ ID NO: 274 - protein, 158 aa, Corynebacterium glutamicum
MTPQKLHRFAALLEMGTWTLLIIGMILKYSGVTDAVTPIAGGIHGFGFLCFAAITITVWINNKWTFPQGIAGLIVSVIPWAALPFALWADKKGLVAGGWRFSDPSEKPHTFFDKILAQLVRHPIRSILILLVIIAVVFSILLAMGPPYDPDAIANTVD

SEQ ID NO: 275 - DNA, 534 bp, Corynebacterium glutamicum
  CDS (65)..(511): RXN03022
acgcctgtgtcatccttttcattagagtggagaaaagcccatacagaaagttggcgcccgagcagtgatcatcaccgctggcatcttggtagcgaccgcgaccgccctcctaatgatcaccgcggtcagcgagtcaacgtacatcgtcatctccctcgccggcttctccctttatggccttggcctcggactcttcgccaccccagtcaccgatactgcgcttggaacacttcccaaagaccgtaccggcgctggtgcaggtgtattcaagatgtcctcttccctcggcgcagcactcggcatcgcaatctccacttcagtgttcctcgcacttcgcgacggcacctccatcaactccgacgtcgcactcgccggaacagtttcacttggcatcaacgttgtattcgcagcaacagccaccatcaccgcagcagtccttattccaaaagccgctggcaaagtctcacaaaccagcatcacccttcctgagccagctatcgctgtaaaaatctaaaacttcaccaggacagataa

SEQ ID NO: 276 - protein, 149 aa, Corynebacterium glutamicum
VIITAGILVATATALLMITAVSESTYIVISLAGFSLYGLGLGLFATPVTDTALGTLPKDRTGAGAGVFKMSSSLGAALGIAISTSVFLALRDGTSINSDVALAGTVSLGINVVFAATATITAAVLIPKAAGKVSQTSITLPEPAIAVKI

SEQ ID NO: 277 - DNA, 586 bp, Corynebacterium glutamicum
  CDS (101)..(586): RXN03151
ccgaacttggagctttgctgttggaggcagccaaatagtcccaatgtaaacgcactgggtagtatttgtttaaccatccacctcaaggagtaaaacgcacgtgctttcccacatcattgatgtcctcgccgacccgatcgatggcaccccacttgtaggcgccgaagatttctcacggttggtgtctgaatctgggcattcctacgatgttgctcgtcaagggtatgtcaccctggctggtggcgcaggtctgcgctattcaggcgatgatgcacagatgatcgcggatcgggaaaccttcctttctggcggtcacttcgcgcccttcgtggaagctgtcaccgagcatgttcaagatgtcgttgaccaggcaggccttagcgatgacgcacagccagtggtctgcgaaatcggcgcgggaaccggctactacttgtcccatacccttgattctgttgcaggatctcgcggaattggcattgacgtttccgtgcacgccgcaaagcgtttggcaaagtgtcaccctcgcgtcggcgcagtcatcgcgaacgcatgggcacgcctgccgattgcagataactcctcg

SEQ ID NO: 278 - protein, 162 aa, Corynebacterium glutamicum
VLSHIIDVLADPIDGTPLVGAEDFSRLVSESGHSYDVARQGYVTLAGGAGLRYSGDDAQMIADRETFLSGGHFAPFVEAVTEHVQDVVDQAGLSDDAQPVVCEIGAGTGYYLSHTLDSVAGSRGIGIDVSVHAAKRLAKCHPRVGAVIANAWARLPIADNSS

SEQ ID NO: 279 - DNA, 543 bp, Corynebacterium glutamicum
  CDS (1)..(543): RXN02832
cgcgggccagtgatggattatacaaatcaatcattagtagcatttttctttaaagcattaacgtcatatttaaagaaacacaattgtttatatgtccttgtagatccatatttaattgaaaatttacgcaatgcagacggtgaaattgttaaatcttatgataaccgagcatttgttagaacaatggataaattaggttataaacaccaaggtttccctgtaggttatgattcaatgagccaaatccgttggctgtcagtgttagatttaaaagataagactgaagaccaacttttaaaagaaatggattatcaaacgagacgtaatattaaaaaaacatatgatattggtgtcaaaactaaaacgttaacgattgatgaaacgcaaacttttttcgacttattccatatggctgaggaaaagcacggtttcaaattccgtgagttaccatactttgaagaaatgcaaaagttatacgatgaccacgccatgttaaagttggcgtatattgatttaaacgagtatttaaaaacgttgcaatta

SEQ ID NO: 280 - protein, 181 aa, Corynebacterium glutamicum
RGPVMDYTNQSLVAFFFKALTSYLKKHNCLYVLVDPYLIENLRNADGEIVKSYDNRAFVRTMDKLGYKHQGFPVGYDSMSQIRWLSVLDLKDKTEDQLLKEMDYQTRRNIKKTYDIGVKTKTLTIDETQTFFDLFHMAEEKHGFKFRELPYFEEMQKLYDDHAMLKLAYIDLNEYLKTLQL

SEQ ID NO: 281 - DNA, 1539 bp, Corynebacterium glutamicum
  CDS (101)..(1516): RXN00165
aaacctccccgggcccggcgcgcgaccgtccaagatgccggcgttggatgccaaattatggactctcaaagtggcgttgtcgcagcggccgtggagctttgtggcgtctgctggcatggcggcgtcttttatctgcaatgggttaacgcctgtgattgtgggtaaggcggtggatgaggctattggcacgagcgatctgcagcgattgtggttctggattgccatgttggcggttcttttcttaacggcgatgacggtgaactggattgctcggtacatgttggtgcggagccagcagttggtcagccatgatttgcgcatgttggtgactgatcggattcaagatccgcgtggttttgctggaaaagagcgcactgcgggtggattgttgtcgattgcgtcatcggatacgcagcgggtgggcgatatcgtcatgatgacggtgttcccggtggcggaattggcgtcgattatttatggcgccgtggtgatgtacagcattaatccgtggttgagtgtggctgtgctgattggtggaccgctgctggttgtggtggctattcaggtctcaaagccgttgcagaagcgttcgggtgctcgtcagcaggcggtggcacaggctgcggctactgcaactgatgtggtgcagggcttgagaattttgaagggtttgggcgcgattgtcacggtgcgccgtcggtacgaggcgatttctggtgaggcttatcggaagacggttcatgcggatgctgcggaagctcgcttgaatggtgtcaccgatgcggcgggcgccatctttgtgtccgcgttgggtattggagcaggatttttggcgctgcaaggtcagatgagtattggtgatttgatcacggttgtgggactcacacagtttttgatcatgccgatgaccatgcttggtcgaaatgtggcatcgcgctgggcatcggcggaggcgtcggcaaagcgtattaggggagtgctcggtgctgattttgagagagtgtctgcgcatgatgcggacaaggctgaggagattatccaacaacttgccaaaggtttgacggttattcgaggcactgatgagcagctcgttgaggtattagagcagttgccacgtactcgggtgattgtggctcctcatgcggcggatctttttgatcaaagtgtcagggacaatgtgcatcccgtggcagaggtcgcggagaaagccattgaagttgcctcctgtgacgatattccaggtggtagttccaagattgtgggcgagggtggacggttgctctcgggtggtcagcgtcagcgcgttgcactggctcgggcgattgcttttgatccagaggtgttggtgcttcaagatcccacaacggcagtggattctgtgacggagcaaaacattgctcagcaagtggcagcacaccgtgcaggaaaagtgaccattgtgtttagtgaggcacccgcgtggagtgcggtggctgatcaacacgttgaggcagctgctttgcgggaggttatgaaatgagtggggagacgtcgaaaagc

SEQ ID NO: 282 - protein, 472 aa, Corynebacterium glutamicum
VASAGMAASFICNGLTPVIVGKAVDEAIGTSDLQRLWFWIAMLAVLFLTAMTVNWIARYMLVRSQQLVSHDLRMLVTDRIQDPRGFAGKERTAGGLLSIASSDTQRVGDIVMMTVFPVAELASIIYGAVVMYSINPWLSVAVLIGGPLLVVVAIQVSKPLQKRSGARQQAVAQAAATATDVVQGLRILKGLGAIVTVRRRYEAISGEAYRKTVHADAAEARLNGVTDAAGAIFVSALGIGAGFLALQGQMSIGDLITVVGLTQFLIMPMTMLGRNVASRWASAEASAKRIRGVLGADFERVSAHDADKAEEIIQQLAKGLTVIRGTDEQLVEVLEQLPRTRVIVAPHAADLFDQSVRDNVHPVAEVAEKAIEVASCDDIPGGSSKIVGEGGRLLSGGQRQRVALARAIAFDPEVLVLQDPTTAVDSVTEQNIAQQVAAHRAGKVTIVFSEAPAWSAVADQHVEAAALREVMK

SEQ ID NO: 283 - DNA, 1470 bp, Corynebacterium glutamicum
  CDS (101)..(1447): RXN01190
cagggttttgatgagaacaacacacaccgcttcaagcattctgcgaagaatgatcaggcggcagcggggcaaggttgcgtttggcgcattctttttggggatgtggcagctgtcggaagcattggtgccgattgcgattggtttgatcgttgatcatgcggttctcacaaaagatctccgccgattagtggtcgggcttgtcgcttttgttgtgctgtttgtggtgttgagtttttctaatcgtttcggttcgcgcgcgttgaatagggccgtgaactttgaatcccatgcgctccgcgtagaggtagccgatcatgcgttgaagaatctggatccgcgcaatttggtgcctggcgaggtgatgtcgcggtccaccgcagatgcggattcttcgacgcgtattttcgggcagatcggaaccggtgtttcggctgcgacgggatttcttggtgcagcgacctacctgttgatcagtgactggctggtcgggttgttggtgcttgtgctggtaccgatcatttcgggagtggttgcactggctagcaagggcatttctaaaaggagtgtcacccagcaggagaagttggcggagtctggtgcgcaggcaagtgacatcatgatggggctgcgcgtgatcaaggcgatcggtggcgagcgttgggccgtgaagacttttgaaaaggcgtcgcaggcatcagcgagagcggcggttgatactgcagttgcttcgggcaaagtcgctggtattggtgagttgtccattgcggtgaatttggctgcggtgttgttgcttgctggttggcgggtcaccacgggggagttggggcctggccagttgatcgcaattgtgggtgtggcggtgtatttgtcagagccgattcgcttgctgagcaactcgattaatgcctcagctattgcgcacggtgcagcggagcgggtggctaatttcttaaacctcgacgaatctcaggcacagtacgaaagcagcgaaacaatcaatgacggcgaattcctcgtcatcgtgcccccagccagcacgcttccacacggcgacaatatcttggctacacctcatgctgccgacattttcgaaggtaccttgcggtcaaatatttccatgaatcatgaggacaacgtgccaattgatccgcaggtaattcgcgcttctggtctgactgacatcattgaggtggacggacttgatgcgccggtgcgcgatacgggaagcaatttatcgggtgggcagcgtcagcgagtggctttggccagggcgttgcatgcagacgcggaagtactggtgctgatggatccaaccagcgcggtggattcagtgacggaggtgtctatcgcgcaggggattaagcagctgcgagcaggcaaaaccaccattgtggtgagttcttcgcccgcgttttacaacttggcggatcgggtgatttcacatgtctaatttgatggcatcatcgacac

SEQ ID NO: 284 - protein, 449 aa, Corynebacterium glutamicum
MWQLSEALVPIAIGLIVDHAVLTKDLRRLVVGLVAFVVLFVVLSFSNRFGSRALNRAVNFESHALRVEVADHALKNLDPRNLVPGEVMSRSTADADSSTRIFGQIGTGVSAATGFLGAATYLLISDWLVGLLVLVLVPIISGVVALASKGISKRSVTQQEKLAESGAQASDIMMGLRVIKAIGGERWAVKTFEKASQASARAAVDTAVASGKVAGIGELSIAVNLAAVLLLAGWRVTTGELGPGQLIAIVGVAVYLSEPIRLLSNSINASAIAHGAAERVANFLNLDESQAQYESSETINDGEFLVIVPPASTLPHGDNILATPHAADIFEGTLRSNISMNHEDNVPIDPQVIRASGLTDIIEVDGLDAPVRDTGSNLSGGQRQRVALARALHADAEVLVLMDPTSAVDSVTEVSIAQGIKQLRAGKTTIVVSSSPAFYNLADRVISHV

SEQ ID NO: 285 - DNA, 1368 bp, Corynebacterium glutamicum
  CDS (101)..(1345): RXN01102
attctatggttgttgggagagatgacttaatttggaatcacgggctttaacacgcgctgacattgagcaacttcccagcatgtggaaaagcccaggtttcgtggctgtcctcgtggcggttgcagcagcgttcggcagttggtcactccttcttcccgtcgtaccgctagcggtcctcaacaacggcggatcaagcgctgtcgccggtgccaccactggcatcttcatggcagctacagtgatcactcagattttcactcccgctgcgctgcggaaaattggctacaccccagtgatggctttcgccgcattcatgctgggtgtgccagccatcgggtacatcttcagcgtcgagccaattccagtgctggtagtgtccgcacttcgaggaattgggttcggtgcgctcaccgtcgcagaatctgcgttggtggctgaactcgttcccgtacgcttcttgggcaaagcttctggaatgttgggcgtatttattggcctttcccaaatgcttttcctgcctgccgggttggcgttaggtgaccaatttggctacaacgtggtctatgttttaggtgccgttatcgcactagttgcagcggtgatgtgtctgcgtattccgcaggttaaggcagcggcaaagcagcaaccacaggtgagcgaacaggagcgttctgtttccacctggaagttggtgctggttccctccttggctgttaccagtttgtcaatgacttttggcgcagtgtcttcattccttccagctgcagtcattgagttagatccaggattaggtgctgcattagcgggtattattttatccattaccggtggttcttcaatggtgttccgctacctgtccggcgttatcgctgaccgccgcggtgtgcctggtaccacgatgattcctgctcagatcattgggttcttaggtgtcgttttaatcaccgtcacaatcttccaaggctggtccgtgtggcttttgattataggtgcagtgatgtttggtggtgcttttggcatggtgcaaaacgaagcgttgctttcaatgtttttccggcttcctcgcactagagtctccgaagcctccgccatctggaatatcgcctttgattcgggaacaggaatcggaagcttcctccttggcatagttgccgcatcgcttgcttacagtggtgcttttggttccggagccgtggtgattttgtttggaatcgttttgaccaccgccgatcgaatcattgggcggcaccgcattactgaatacaacaacacccgcgcgcgtttgcgccaggtgccagtcgctcggcgtgcagtgcaagggctgcgcaacaggcgcaaagatcgctaaaacgcttttcgacgccaccc

SEQ ID NO: 286 - protein, 415 aa, Corynebacterium glutamicum
VAVLVAVAAAFGSWSLLLPVVPLAVLNNGGSSAVAGATTGIFMAATVITQIFTPAALRKIGYTPVMAFAAFMLGVPAIGYIFSVEPIPVLVVSALRGIGFGALTVAESALVAELVPVRFLGKASGMLGVFIGLSQMLFLPAGLALGDQFGYNVVYVLGAVIALVAAVMCLRIPQVKAAAKQQPQVSEQERSVSTWKLVLVPSLAVTSLSMTFGAVSSFLPAAVIELDPGLGAALAGIILSITGGSSMVFRYLSGVIADRRGVPGTTMIPAQIIGFLGVVLITVTIFQGWSVWLLIIGAVMFGGAFGMVQNEALLSMFFRLPRTRVSEASAIWNIAFDSGTGIGSFLLGIVAASLAYSGAFGSGAVVILFGIVLTTADRIIGRHRITEYNNTRARLRQVPVARRAVQGLRNRRKDR

SEQ ID NO: 287 - DNA, 348 bp, Corynebacterium glutamicum
  CDS (101)..(325): RXN00788
cgcatccctctagttttccatcacctcaatgaacggcgctaactccggttcattgcgcaattgatccagcactgcttgcagtgaggcctcattagttggcatggcctcctccatcaacatcggagtgttcaaccttggaaatgctgttgctgcctggcttgctggtgcaaccatcaccacttcccttggactcacatcagccggattagttggcggtttgatgacgtccctcggactagtgttggccatcgtggctgtggttttgcgtcgaaaagcgcaaggcacccaagcgaccatcagcgttgtggagcaccagcccgcccaataaataatttctctcttctaatt

SEQ ID NO: 288 - protein, 75 aa, Corynebacterium glutamicum
MASSINIGVFNLGNAVAAWLAGATITTSLGLTSAGLVGGLMTSLGLVLAIVAVVLRRKAQGTQATISVVEHQPAQ

SEQ ID NO: 289 - DNA, 1764 bp, Corynebacterium glutamicum
  CDS (101)..(1741): RXN02119
ttcggtccgctctggcaaaaatggctggctgccacctcggcgcagcagcttaagggctgggcttaaattgcttgtcgacgcctagtgccacaatggagacatgaccgaaacacttgtggtgaatggccttgcaggcggctatgggcaccgcacattatttaacgatgtgaatctcaccgtagctgccggcgatgtcgtgggcgttgtcggcgtcaatggcgctggtaaatccacatttctaaaaattctggcgggcgtggaaaagccactggctggaactatcgcgctttcgccagccgatgcttttgtgggctacttgccacaggaacacacccgcacgtctggagagacgatcgcagtttacattgctcgtcgaaccggctgccaagctgcaacaactgccatggatgacaccgccgaagcgtttggtgcggatccagacaacgctgccttggccgatgcatacgccgaggcgctggatcggtggatggccagtggcgcagccgatttggatgaacgcatccccatcgtgctcgctgatttgggctttgagcttcccacctcgacgctgatggaaggactttcaggcgggcaggcagcccgggtcgggctggcggcgttactgttgtcacgttttgacattgtgcttctcgacgagcccaccaacgatttggatctcgacggtcttgagcaactggagaattttgttcaggggcttcgcgggggagtcgtactggtcagccatgatcgtgagtttctttccaggtgtgtgaccactgtgctggaactcgatctgcaccaaaattcccaccatgtttatggcggtggatatgattcctaccttgaggaacgcgcagtgctacgccagcacgcccgtgaccaatatgaggaatttgcggaaaagaagaaggaccttgtggcacgtgctcgaacgcagcgtgaatggtctagtcacggtgtccgcaatgctattaaacgtgcacctgacaacgacaaacttcggaagaaagccgctgcggaatccagtgaaaagcaggctcaaaaagtccgccagatggaaagccgcatcgctcggttagaagaagttgaagagccacgtaaagaatggaaactgcagttcagcgtcggtaaggcgtcgcggtcaagttctgttgtttccacgttgaatgatgcaagcttcacccaaggcgatttcaccttgggaccagtatccatccaagtaaatgctggcgatcgcattggcatcacaggacccaacggtgctggtaaatccacattgctgcgcggactattgggaaaccaagaacccaccagcggtactgccacgatgggcacgagcgtggcgatcggagaaatcgatcaggcacgagcgttacttgatccacagttgccactgatttctgcgtttgaaaagcatgttccagacttaccgatcagtgaggtgcgcacactgctcgcgaaatttgggctgaatgataatcatgtggaacgggacgtcgaaaagctatctcctggcgagcgcacgcgcgccggacttgcgctgctacaggtgcggggcgtcaacgtgcttgttcttgatgagcccaccaaccaccttgacctggaggccatcgagcaattggagcaagcgttggcctcgtatgatggtgtgttgctgctggtcacgcacgatcgtcgcatgttggacgctgtgcagaccaatcgtcgttggcatgtcgaggctggcgaagttagggagctataaccgtttccgtattgatgcca

SEQ ID NO: 290 - protein, 547 aa, Corynebacterium glutamicum
MTETLVVNGLAGGYGHRTLFNDVNLTVAAGDVVGVVGVNGAGKSTFLKILAGVEKPLAGTIALSPADAFVGYLPQEHTRTSGETIAVYIARRTGCQAATTAMDDTAEAFGADPDNAALADAYAEALDRWMASGAADLDERIPIVLADLGFELPTSTLMEGLSGGQAARVGLAALLLSRFDIVLLDEPTNDLDLDGLEQLENFVQGLRGGVVLVSHDREFLSRCVTTVLELDLHQNSHHVYGGGYDSYLEERAVLRQHARDQYEEFAEKKKDLVARARTQREWSSHGVRNAIKRAPDNDKLRKKAAAESSEKQAQKVRQMESRIARLEEVEEPRKEWKLQFSVGKASRSSSVVSTLNDASFTQGDFTLGPVSIQVNAGDRIGITGPNGAGKSTLLRGLLGNQEPTSGTATMGTSVAIGEIDQARALLDPQLPLISAFEKHVPDLPISEVRTLLAKFGLNDNHVERDVEKLSPGERTRAGLALLQVRGVNVLVLDEPTNHLDLEAIEQLEQALASYDGVLLLVTHDRRMLDAVQTNRRWHVEAGEVREL

SEQ ID NO: 291 - DNA, 1638 bp, Corynebacterium glutamicum
  CDS (101)..(1615): RXN01605
attgaagtcagcgccgaggaagccgcgagggaatcagacgacgggcacctactacttcggcattgaaattccgaagaacttcagcgattctattgccagcgtgaccagcgattcacccgcgccagcaaccgtcaacgcggtattcaacaacagcaacggcttcattgcctccatgctgggcaaccaggtggtcaacactgttgtggagaccatggacacggaattcggcgtccgcattgtggataacatgctcgtcggtttctccaccttgggcgacggcatgaaccaagccgccgaaggtgccactacgctcagcgatggcgtcggttccgccaacgacggtgcagttcagcttgccgacggcgcggtcaccctgcgcgacggcatcgcaagtgccaatgagggtgcgcaatcgcttgccgacggcgccagccagctcgacaccggcctcggctccgcggctacaggcagccaaacgctcgccgacggtctatccagcctgtctgcgggcaccgcccaactaggccaaggcgcaacccaggtttcagatggcgtgggccaacttgtcgaccaagtagcaccactgaccgcctatgttccagacatcaactctcagttgatcaccctgcgcgacggcgcagccaccattgcctctgaactatctgatccctccagcacctaccgctccggcgtggactccgctgtgagcgcatcccagcaactagcagccggcctgcaaaccctgaaagacggatccagccaactcagcatcggtgcacgcaccctcgctgatggcaccagccaattggccgcaggttccgaacagctagttgttggcgcacaagcactgcgcgacggcaccgtccagcttgatgaaggctccagcgaactcgccctcaaactcaccgacggcgcaagccaagtaccaaccttcgctgacggcgcagacaccaccatcgcaaccccagttgaaacagaacaagcaggagacaccacaccgctcttcggtattggtctcgcaccattcttcatggctgtcggcctgttcatgggagcaaccgttgcctggatgatcctgcacccaatcagtcgccgcgcactcgactcccgcatgggaggcttccgaggcaccctggcaagctaccttccatcaacagtcttaggccttggccaagcaaccatcatgtgggcagtactgtacttcctgctcgacctcaatccagctcacccagctggactgtggatggcgatggtcgccatctcatgggtattcatctccattacccatatgttcaacaacgtggcaggaccctccgcaggccgtgtgctgtccatcgtgatgatgtccttccagctagtctcctccggtggcctatacccaccagaaacccagccagcattcttccactggttccacacctacgacccgatcacctacgcagtcaacctcgtgcgccaaatgatcttcaacgaaaccccatccaacgacccacgcttcatacaagcaatctgggtactgctcttcatctgggcactgatgctcgccatctccaccctggcgaatagaacaaacaaggttcttcgcatgaaggactaccacccagaactgaaggtctaaaagcttttcccgcccggttc

SEQ ID NO: 292 - protein, 505 aa, Corynebacterium glutamicum
VTSDSPAPATVNAVFNNSNGFIASMLGNQVVNTVVETMDTEFGVRIVDNMLVGFSTLGDGMNQAAEGATTLSDGVGSANDGAVQLADGAVTLRDGIASANEGAQSLADGASQLDTGLGSAATGSQTLADGLSSLSAGTAQLGQGATQVSDGVGQLVDQVAPLTAYVPDINSQLITLRDGAATIASELSDPSSTYRSGVDSAVSASQQLAAGLQTLKDGSSQLSIGARTLADGTSQLAAGSEQLVVGAQALRDGTVQLDEGSSELALKLTDGASQVPTFADGADTTIATPVETEQAGDTTPLFGIGLAPFFMAVGLFMGATVAWMILHPISRRALDSRMGGFRGTLASYLPSTVLGLGQATIMWAVLYFLLDLNPAHPAGLWMAMVAISWVFISITHMFNNVAGPSAGRVLSIVMMSFQLVSSGGLYPPETQPAFFHWFHTYDPITYAVNLVRQMIFNETPSNDPRFIQAIWVLLFIWALMLAISTLANRTNKVLRMKDYHPELKV

SEQ ID NO: 293 - DNA, 664 bp, Corynebacterium glutamicum
  CDS (101)..(664): RXN01091
tcgtcggaaaaactggcgatactattgataacgggcatgggttcaccttcgataaagcacggtctatgctggactatcgccttttgacacgagtatcgcaatggtcccgaacacagtccttatccatgacgaaaccgccgatctggcgacgcagatccagcggctggaacatatcatggcgtgcctgcgcgatccggtcagcggatgcccgtgggatattgaacagacctttgccagcatcgcgccccacacgattgaggaaggctacgaggttgccgacgccatcgcgcaggaagactggcccgagctacgcggcgagttgggcgatttgctgtttcagaccgtgtttcacgcccaaatggcgcgcgaggcaggccatttcgctttggttgacgtggtgaaggcaatttcggacaagatggttttgcgccatccgcacgtgttcggcgcgcagtcgaacgcgaaatccgccgaccagcaggtggaagattgggaagtcatcaaggcgcccgagcgcgcgggcaaagcgcaaaagggcgttttggatggcgtcgcgctgggactgcctgccctgatgcgcgcgacgaagctgcaaaacaacgccgcgcgcgttgggtttgattggcccgacattgggcaggtacttggaaaggtgaccgaggaa

SEQ ID NO: 294 - protein, 188 aa, Corynebacterium glutamicum
MVPNTVLIHDETADLATQIQRLEHIMACLRDPVSGCPWDIEQTFASIAPHTIEEGYEVADAIAQEDWPELRGELGDLLFQTVFHAQMAREAGHFALVDVVKAISDKMVLRHPHVFGAQSNAKSADQQVEDWEVIKAPERAGKAQKGVLDGVALGLPALMRATKLQNNAARVGFDWPDIGQVLGKVTEE

SEQ ID NO: 295 - DNA, 357 bp, Corynebacterium glutamicum
  CDS (101)..(334): RXS02979
ctaggtcaaggaacttcactcggctagtccttagactcaaatgtgttcagacaaacactggcaccgtaaggcacgaaagttaccgaaaggactggttcccatgaccgccccaaacactctcaagcaaacaactcttcgctctgatgagttctcttgcccatcctgtgtctccaagattgaaaacaaattgaatggattggatggcgtcgacaatgcagaggtgaagttctcctccggaagaatccttgttgatcacgaccccagcaaggtctctatcaaggatctagtcgctgcagtcgcagaggttggctacaccgcaaagccatcagcaatctaaaactctcagttagaccatta

SEQ ID NO: 296 - protein, 78 aa, Corynebacterium glutamicum
MTAPNTLKQTTLRSDEFSCPSCVSKIENKLNGLDGVDNAEVKFSSGRILVDHDPSKVSIKDLVAAVAEVGYTAKPSAI

SEQ ID NO: 297 - DNA, 357 bp, Corynebacterium glutamicum
  CDS (101)..(334): RXS02987
gttgtttgatccaggtcaaggaattaacccggaaaggaccgtatctttaaaggtgcaagcacaggaacatgacgataaaagatgaaaggacctggttacgatgaccgcccccgccacgctgaagaacaccaccttgcgctctgatgagttcacctgtccgagctgtgtcgccaagatcgaaaacaagctgaatggtttggacggcgtggagaatgcggaggtgaagttctcctccggacgcatcctgatcacccacgacccacagaaggtctccgtacgtgacctggtcaccgcggtagccgaggtcggttacaccgccaagccgtcggcgatctgacgcactcccgaccccacaag

SEQ ID NO: 298 - protein, 78 aa, Corynebacterium glutamicum
MTAPATLKNTTLRSDEFTCPSCVAKIENKLNGLDGVENAEVKFSSGRILITHDPQKVSVRDLVTAVAEVGYTAKPSAI

SEQ ID NO: 299 - DNA, 492 bp, Corynebacterium glutamicum
  CDS (101)..(469): RXS03095
aacgcctcaattagtgccagaccttgccgaccgcagaccaaacttcaccatttcaaaccatccctagccacaacaacggcagttgtgcaatgatctgcgtatgaatgcagataagaaaatgtgcggaatgaacccggatagccaatacgtcgaacttgccgtcgaagttttcggactcctcgcggacgccactcgagttcgcatcatcttggcacttcgaaacagtggtgaactttccgtaaaccacctcgcggacatcgtcgataaatcccccgcagcagtttcccaacacctcgcccggctgcgcatggcccgaatcgtgtccacccgtcaagaaggtcaacgagttttctacaaactcaccaatgaacacgcatcacagctagtctccgacgctatttttcaggcggaacacaccattgcggacggccagactcccccacaccaccaccgagaacgagaacaatcatgaccacccacagtcaccaagaa

SEQ ID NO: 300 - protein, 123 aa, Corynebacterium glutamicum
MNADKKMCGMNPDSQYVELAVEVFGLLADATRVRIILALRNSGELSVNHLADIVDKSPAAVSQHLARLRMARIVSTRQEGQRVFYKLTNEHASQLVSDAIFQAEHTIADGQTPPHHHREREQS

SEQ ID NO: 301 - protein, 10 aa, Corynebacterium glutamicum
APALGPTLSG

SEQ ID NO: 302 - protein, 10 aa, Corynebacterium glutamicum
  MOD_RES (2)..(4): Variable amino acid
  MOD_RES (7)..(8): Variable amino acid
GXXXGPXXGG

SEQ ID NO: 303 - DNA, 20 bp, Corynebacterium glutamicum
ctccaggattgctccgaagg

SEQ ID NO: 304 - DNA, 20 bp, Corynebacterium glutamicum
cacagtggttgaccactggc

SEQ ID NO: 305 - DNA, 18 bp, Artificial Sequence
  Description of Artificial Sequence: Synthetic primer
ggaaacagtatgaccatg

SEQ ID NO: 306 - DNA, 17 bp, Artificial Sequence
  Description of Artificial Sequence: Synthetic primer
gtaaaacgacggccagt
